(19) United States
(12) Patent Application Publication
(10) Pub. No.: US 2025/0197811 A1
(43) Pub. Date: Jun. 19, 2025

(54) COMPOSITIONS AND METHODS FOR GENERATING CELLS WITH REDUCED IMMUNOGENICITY

(71) Applicant: Celyntra Therapeutics SA, Mont-Saint-Guibert (BE)

(72) Inventors: Tanya Warnecke, Boulder, CO (US); Roland Baumgartner, Boulder, CO (US); John Schiel, Boulder, CO (US); Nicholas Eion Timmins, Boulder, CO (US)

(73) Assignee: Celyntra Therapeutics SA, Mont-Saint-Guibert (BE)

(21) Appl. No.: 18/847,689

(22) PCT Filed: Mar. 22, 2023
(86) PCT No.: PCT/US2023/015978

§ 371 Date: Sep. 17, 2024

Related U.S. Application Data
(60) Provisional application No. 63/322,634, filed on Mar. 22, 2022.

(51) Int. Cl. C12N 5/074; C12N 5/0783; C12N 9/22; C12N 15/62; C12N 15/85

(52) U.S. Cl. CPC C12N 5/0696; C12N 5/0636; C12N 9/22; C12N 15/62; C12N 15/85; C12N 2310/20; C12N 2510/00; C12N 2810/00

(57) ABSTRACT

CRISPR-Cas systems have been engineered for various purposes, such as genomic DNA cleavage, base editing, epigenome editing, and genomic imaging. Although significant developments have been made, there still remains a need for new and useful CRISPR-Cas systems as powerful precise genome targeting tools. The invention disclosed herein comprises CRISPR-Cas based methods for high integration and expression efficiency of transgenes together with high post-transfection cell viability in eukaryotic cells.

### REFERENCE TO RELATED APPLICATIONS

[0001] This application claims the benefit of and priority to U.S. Provisional Patent Application No. 63/322,634, filed Mar. 22, 2022, the disclosure of which is hereby incorporated by reference in its entirety for all purposes.

### INCORPORATION BY REFERENCE

[0002] All publications, patents, and patent applications mentioned in this specification are herein incorporated by reference to the same extent as if each individual publication, patent, or patent application was specifically and individually indicated to be incorporated by reference.

### BACKGROUND

[0003] Current cell therapy products, e.g., CAR T cells, recover cells from the prospective patient wherein those cells are then modified, optionally expanded, and then used for one or more treatments. The overall process is time consuming, which can negatively impact the success the treatment outcome, and expensive. As a result, there is a strong need to develop on-demand, reasonably priced, allogeneic cell therapy products that demonstrate reduced immunogenicity, e.g., reduced Graft versus Host and/or Host versus Graft response.

### BRIEF DESCRIPTION OF THE DRAWINGS

[0004] The novel features of the invention are set forth with particularity in the appended claims. A better understanding of the features and advantages of the present invention will be obtained by reference to the following detailed description that sets forth illustrative embodiments, in which the principles of the invention are utilized, and the accompanying drawings of which:

[0005] FIG. 1A shows a schematic representation showing the structure of an exemplary single guide Type V-A CRISPR system. FIG. 1B is a schematic representation showing the structure of an exemplary dual guide Type V-A CRISPR system.

[0006] FIGS. 2A-C show a series of schematic representation showing incorporation of a protecting group (e.g., a protective nucleotide sequence or a chemical modification) (FIG. 2A), a donor template-recruiting sequence (FIG. 2B), and an editing enhancer (FIG. 2C) into a Type V-A CRISPR-Cas system. These additional elements are shown in the context of a dual guide Type V-A CRISPR system, but it is understood that they can also be present in other CRISPR systems, including a single guide Type V-A CRISPR system, a single guide Type II CRISPR system, or a dual guide Type II CRISPR system.

[0007] FIG. 3 shows percent of treated cell populations (A) triple knock-out of TCR, HLA-I, and HLA-II, or (B) triple KO TCR, HLA-I, HLA-II, and insertion of a CAR after treatment as measured by flow cytometry; FL=full length, ldsPLA074=linear DNA used to insert CAR.

[0008] FIG. 4 shows reduced HLA-I, HLA-II, and/or TCR surface expression (y-axis) in cells transfected with RNPs comprising a nucleic acid-guided nuclease complexed with various gCD3D gNAs.

[0009] FIG. 5 shows reduced HLA-I, HLA-II, and/or TCR surface expression (y-axis) in cells treated with various RNPs comprising a nucleic acid-guided nuclease complexed with CD247, CD3G, or TRAC gNAs.

[0010] FIG. 6A shows reduced TCR surface expression (y-axis) in cells transfected with RNPs comprising a nucleic acid-guided nuclease complexed with TRBC gNAs.

[0011] FIG. 6B shows simultaneous TRBC KO and CAAR KI (CAAR expression, y-axis) in cells transfected with RNPs comprising a nucleic acid-guided nuclease complexed with TRBC gNAs and repair template.

[0012] FIG. 7 shows reduced TRC surface expression (7A, y-axis) in cells transfected with RNPs comprising a nucleic acid-guided nuclease complexed with CD3E gNAs; and simultaneous CD3E KO and CAR KI (CAR expression, y-axis, 7B) in cells transfected with RNPs comprising a nucleic acid-guided nuclease complexed with TRBC gNAs and repair template.

### DETAILED DESCRIPTION

### Outline

[0013] I. Cells with reduced immunogenicity
[0014] A. Compositions comprising cells
   [0015] 1. Cells comprising genomic modifications
   [0016] 2. Cell populations comprising genomic modifications
   [0017] 3. Guide nucleic acids and nucleic acid-guided nuclease complexes for generating genomic modifications
[0018] B. Methods for reducing immunogenicity of cells
[0019] II. Engineered non-naturally occurring dual guide CRISPR-cas systems
[0020] A. Cas proteins
[0021] B. Guide nucleic acids
[0022] C. gNA modifications
[0023] III. Composition and methods for targeting, editing, and/or modifying genomic DNA
[0024] A. Ribonucleoprotein (RNP) delivery and “cas RNA” delivery
[0025] B. CRISPR expression systems
[0026] C. Donor templates
[0027] D. Efficiency and specificity
[0028] E. Multiplex
[0029] F. Genomic safe harbors
[0030] IV. Pharmaceutical compositions
[0031] V. Therapeutic uses
[0032] A. Gene therapies
[0033] VI. Kits
[0034] VII. Embodiments
[0035] VIII. Examples
[0036] IX. Equivalents

### I. CELLS WITH REDUCED IMMUNOGENICITY

[0037] The immune system recognizes specific antigen patterns on the cell surface, e.g., in humans, human leukocyte antigen (HLA) proteins. These patterns of protein antigens are genetically determined and vary between individuals, where an individual's immune system recognizes its own specific antigen pattern as “self” and those antigen patterns that differ as “non-self” or “foreign”. Typically, foreign cells, e.g., allogeneic cells (cells from a genetically dissimilar individual), and/or those demonstrating HLA patterns different than expected, elicit one or more immune responses in the host. In the context of cell therapy applications, this immune response, termed “Host versus Graft” (HvG), can hinder and/or reduce the efficacy of the one or more therapeutic agents as the body recognizes the therapeutic agent as foreign and targets the therapeutic agent for removal.

[0038] Further, engineered cells, e.g., modified cells, used in cell therapy can recognize the antigen pattern of host cells as foreign and elicit an immune response. This immune response, as herein termed “Graft versus Host” (GvH), can result in the therapy demonstrating a negative and/or harmful effect on the recipient.

[0039] Provided herein are compositions, methods, and/or kits for generating a cell that demonstrates reduced immunogenicity. In certain embodiments, provided herein are cells comprising one or more modifications that result in reduced HvG, GvH, and/or both. In certain embodiments, the cell comprises eukaryotic cells. In certain embodiments, the cell comprises human cells. In certain embodiments, the cell comprises a human immune cell such as a neutrophil, cosinophil, basophil, mast cell, monocyte, macrophage, dendritic cell, natural killer cell, a lymphocyte, or a combination thereof, for example a T cell. In preferred embodiments, the cell comprises a T cell. In certain embodiments, the cell comprises an engineered immune cell, for example a chimeric antigen receptor (CAR)-T cell comprising one or more CAR polypeptides or portions thereof and/or a dual CAR. In certain embodiments, the cell comprises a human stem cell such as a human pluripotent, multipotent stem cell, embryonic stem cell, induced pluripotent stem cell, hematopoietic stem cell, a CD34+ cell, or a combination thereof. In preferred embodiments, the human stem cell comprises hematopoietic stem cells, CD34+ stem cells, and/or induced pluripotent stem cells (iPSC). In certain embodiments, the cell comprises an allogeneic cell. As used herein, the term “allogeneic” includes cells from the same species that are genetically dissimilar and hence immunologically incompatible with the host.

[0040] In certain embodiments, provided herein are compositions, methods, and/or kits comprising dual CARs, e.g., a CAR fusion protein or two separate CARs. As used herein, the term “dual CAR” includes a polypeptide comprising a first CAR or portion thereof and a second CAR or portion thereof, either separate, or connected via one or more polypeptide linkers. In certain embodiments, the second CAR or portion thereof targets the same antigen as the first CAR or portion thereof. In certain embodiments, the second CAR or portion thereof targets a different antigen than the first CAR or portion thereof. Additionally disclosed herein are polypeptides comprising any number of CARs or portions thereof, separate or connected via one or more polypeptide linkers. In certain embodiments, a cell can comprise at least 1, 2, 3, 4, 5, 6, 7, 8, 9, 10, 11, 12, 13, or 14 and/or no more than 15, 14, 13, 12, 11, 10, 9, 8, 7, 6, 5, 4, 3, or 2 CARs or portions thereof, for example 1-15, preferably 1-10, more preferably, 2-10, even more preferably 2-7, yet more preferably 2-5 CARs or portions thereof, separately or connected via one or more polypeptide linkers. The polypeptide linker can comprise any suitable linker comprising natural or unnaturally occurring amino acids.

[0041] In certain embodiments, a cell can be engineered to comprise one or more genomic modifications. In certain embodiments, the cell can be engineered to comprise one or more genomic modifications that reduce the immunogenicity of the cells, e.g., the modified cell results in little to no immune response in vitro and/or in vivo. In certain embodiments, an allogeneic cell with respect to a host (recipient, patient, or suitable alternative) can be engineered to comprise one or more genomic modifications that reduce the immunogenicity of the one or more allogeneic cells in the host. In certain embodiments, the cell can be engineered to elicit no more than 90, 80, 70, 60, 50, 40, 30, 25, 20, 15, 10, 9, 8, 7, 6, 5, 4, 3, 2, or 1% of the immune response as compared to an un-engineered equivalent. In certain embodiments, the cell can be engineered to elicit no immune response in a host. The immune response can be measured using any suitable technique, for example, flow cytometry or an ELISA.

[0042] In certain embodiments, the cell comprises (1) one or more genomic modifications that partially or completely inactivates one or more genes that codes for a subunit of an HLA-1 protein, (2) one or more genomic modifications that partially or completely inactivates one or more genes coding for a subunit of an HLA-2 protein or a transcription factor regulating the expression of one or more subunits of an HLA-2 protein, and/or (3) one or more genomic modifications that partially or completely inactivates one or more genes that codes for a subunit of a TCR protein. In a preferred embodiment, the cell comprises all three genomic modifications. In certain embodiments, the one or more genomic modifications completely inactivates the one or more genes. In certain embodiments, the one or more genomic modifications at least partially or completely eliminates surface expression of active (immunogenic) proteins. In certain embodiments, the one or more genomic modifications completely eliminates surface expression of active (immunogenic) proteins. In certain embodiments, the cell comprising the one or more genomic modifications can further comprise one or more additional modifications including, but not limited to, introduction of one or more heterologous genes, e.g., transgenes. The one or more transgenes can be introduced into any suitable location in the genome. In certain embodiments, the one or more transgenes are introduced into a safe harbor site (SHS), e.g., a safe harbor, as discussed in the Genomic safe harbors section below. In certain embodiments, the one or more transgenes are introduced into one or more of the sites comprising a genomic modification (1) through (3), for example, a CAR transgene can be introduced into one or more genes coding for a subunit of a TCR protein, e.g., a TRAC gene, and/or a B2M-HLA-E and/or a B2M HLA-G fusion protein can be introduced into one or more genes coding for a subunit of an HLA-1 protein, e.g., a B2M gene.

[0043] In certain embodiments, provided herein are compositions comprising one or more populations of cells having genetic modifications as described herein. In certain embodiments, the composition comprises a single cell population, wherein each of the cells comprises the same set of genomic modifications (1) through (3). In certain embodiments, provided herein are compositions comprising a plurality of cell populations, wherein each cell population comprises a different set of genomic modifications. In general, at least one cell population comprises cells that comprise all of (1) one or more genomic modifications that partially or completely inactivates one or more genes that codes for a subunit of an HLA-1 protein, (2) one or more genomic modifications that partially or completely inactivates one or more genes coding for a subunit of an HLA-2 protein or a transcription factor regulating the expression of one or more subunits of an HLA-2 protein, and (3) one or more genomic modifications that partially or completely inactivates one or more genes that codes for a subunit of a TCR protein, in addition to one or more additional cell populations that do not comprise all three genetic modifications. In certain embodiments, the one or more additional cell populations comprise cells comprising (1) one or more genomic modifications that partially or completely inactivates one or more genes that codes for a subunit of an HLA-1 protein, (2) one or more genomic modifications that partially or completely inactivates one or more genes coding for a subunit of an HLA-2 protein or a transcription factor regulating the expression of one or more subunits of an HLA-2 protein, and/or (3) one or more genomic modifications that partially or completely inactivates one or more genes that codes for a subunit of a TCR protein, but not all of (1)-(3). In a preferred embodiment, the subunit of an HLA-1 protein comprises B2M. In a preferred embodiment, the transcription factor regulating the expression of one or more subunits of an HLA-2 protein comprises CIITA. In certain embodiments, the subunit of a TCR protein is an alpha subunit or a beta subunit. In a preferred embodiment, the gene that codes for a subunit of a TCR protein is a TRAC gene. In certain embodiments, the subunit of a TCR protein is a TRAC, TRBC, CD3E, CD3D, CD3G, or CD3Z protein. In a more preferred embodiment, at least one cell population comprises cells that comprise all of (1) one or more genomic modifications that partially or completely inactivates a B2M gene, (2) one or more genomic modifications that partially or completely inactivates a CIITA gene, and (3) one or more genomic modifications that partially or completely inactivates a TRC subunit gene, e.g., a TRAC gene, in addition to one or more additional cell populations one or more, but not all three, genomic modifications. In certain embodiments, the one or more genomic modifications at least partially or completely eliminates surface expression of active (immunogenic) proteins. In certain embodiments, the one or more genomic modifications completely eliminates surface expression of active (immunogenic) proteins. In certain embodiments, the one or more cells comprising the one or more genomic modifications can further comprise one or more additional modifications including, but not limited to, introduction of one or more heterologous genes, e.g., transgenes. The one or more transgenes can be introduced into any suitable location in the genome. In certain embodiments, the one or more transgenes are introduced into a safe harbor site (SHS), e.g., a safe harbor, as discussed in the Genomic safe harbors section below. In certain embodiments, the one or more transgenes are introduced into one or more of the sites comprising a genomic modification (1) through (3), for example, a CAR transgene can be introduced into one or more genes coding for a subunit of a TCR protein, e.g., a TRAC gene, and/or a B2M-HLA-E and/or a B2M HLA-G fusion protein can be introduced into one or more genes coding for a subunit of an HLA-1 protein, e.g., a B2M gene. In certain embodiments, the plurality of cell populations comprise at least 1, 2, 3, 4, 5, 6, 7, 8, 9, 10, 11, 12, 13, 14, 15, 16, 17, 18, 19, 20, 25, 30, 35, 40, or 45 and/or no more than 2, 3, 4, 5, 6, 7, 8, 9, 10, 11, 12, 13, 14, 15, 16, 17, 18, 19, 20, 25, 30, 35, 40, 45, or 50 cell populations, for example 1-50 cell populations.

[0044] Cells can be engineered using any suitable composition and method. In certain embodiments, a cell can be engineered by delivering to the cell a composition comprising a site-specific nuclease and/or one or more polynucleotides encoding for the site-specific nuclease. The site-specific nuclease can be any suitable nuclease, such as a homing endonuclease, a TALEN, a meganuclease, an argonaut, and/or a CRISPR/Cas nuclease, i.e., a nucleic acid guided nuclease. In preferred embodiments, the site-specific nuclease comprises a nucleic acid-guided nuclease. The site-specific nuclease can hydrolyze the backbone, i.e., generate one or more cuts or strand breaks, in the DNA duplex, at or near the nuclease's recognition site, i.e., the target site. The one or more strand breaks in at least one strand of the DNA can be repaired via any suitable innate cell repair mechanism, such as non-homologous recombination (NHEJ) and/or homology directed repair (HDR). In certain embodiments, repair one or more strand breaks in at least one strand of the DNA by NHEJ results in one or more genomic modifications, such as insertions and/or deletions (INDELS). In certain embodiments, one or more portions of heterologous DNA, e.g., donor template, can be introduced into the cells and at least a portion of the heterologous DNA can be inserted by the cell at or near the one or more strand breaks in the DNA by HDR.

[0045] In certain embodiments, the site-specific nuclease comprises a nucleic acid-guided nuclease, e.g., a CRISPR/Cas nuclease. In certain embodiments, nucleic acid-guided nuclease comprises one or more engineered, non-naturally occurring components. In certain embodiments, the nucleic acid-guided nuclease comprises a Class 1 or Class 2 Cas nuclease, such as a Type V-A, V-B, V-C, V-D, or V-E. In certain embodiments, the nucleic acid-guided nuclease comprises an amino acid sequence at least 80%, at least 85%, at least 90%, at least 95%, at least 99%, or 100% identical to an amino acid sequence of a MAD, ART, or ABW nuclease, such as a MAD1, MAD2, MAD3, MAD4, MAD5, MAD6, MAD7, MAD8, MAD9, MAD10, MAD11, MAD12, MAD13, MAD14, MAD15, MAD16, MAD17, MAD18, MAD19, MAD20, ARTI, ART2, ART3, ART4, ART5, ART6, ART7, ART8, ART9, ART10, ART11, ART11*, ART12, ART13, ART14, ART15, ART16, ART17, ART18, ART19, ART20, ART21, ART22, ART23, ART24, ART25, ART26, ART27, ART28, ART29, ART30, ART31, ART32, ART33, ART34, and/or ART35 nuclease. In preferred embodiments, the nucleic acid-guided nuclease comprises a MAD2, MAD7, ART11, ART11*, or ART2 nuclease. In more preferred embodiments, the nucleic acid-guided nuclease comprises an amino acid sequence at least 80%, at least 85%, at least 90%, at least 95%, at least 99%, or 100% identical, to the amino acid sequence of MAD2, MAD7, ART2, ART11, or ART11*. In even more preferred embodiments, the nucleic acid-guided nuclease comprises an amino acid sequence that is at least 80%, at least 85%, at least 90%, at least 95%, 99%, or 100% identical, to the amino acid sequence of SEQ ID NO: 37. In certain embodiments, the nucleic acid-guided nuclease comprises one or more nuclear localization signals (NLS), for example 1, 4, or 5 nuclear localization signals, such as 1-5 NLS at the carboxy terminus, 1-5 NLS at the amino terminus, or a combination thereof. In certain embodiments, provided herein the nucleic-acid guided nuclease comprises one N-terminal NLS and 3 C-terminal NLS. In certain embodiments, the one or more NLS comprises SEQ ID NOS: 40, 51, and 56. Additional nucleases and modifications thereof may be found in the Cas proteins section below.

[0046] In certain embodiments, the nucleic acid-guided nuclease further comprises a guide nucleic acid. In certain embodiments, the guide nucleic acid comprises a targeter nucleic acid and a modulator nucleic acid. In certain embodiments, the targeter nucleic acid comprises a targeter nucleic acid comprising a targeter stem sequence and a spacer sequence. In certain embodiments, the modulator nucleic acid comprises a modulator stem sequence complementary to the targeter stem sequence, and, optionally, a 5′ sequence. In certain embodiments, the guide nucleic acid comprises a single polynucleotide. In certain embodiments, the guide nucleic acid comprises an engineered, non-naturally occurring guide nucleic acid. In certain embodiments, the guide nucleic acid comprises a dual guide nucleic acid (as described in the Guide nucleic acids section below), wherein the targeter nucleic acid and the modulator nucleic acid are separate polynucleotides. In certain embodiments wherein the guide nucleic acid is a dual guide nucleic acid, the stem of the targeter nucleic acid and the stem of the modulator nucleic acid hybridize. In certain embodiments, the dual guide nucleic acid is capable of binding to and activating a nucleic acid-guided nuclease, that, in a naturally occurring system, is activated by a single cRNA in the absence of a tracrRNA.

[0047] In certain embodiments, the guide nucleic acid comprises one or more chemical modifications to one or more nucleotides and/or internucleotide linkages at or near the 5′ end, the 3′ end, and/or both as described in the gNA modifications section below. In certain embodiments, the chemical modification comprises a 2′-O-alkyl, a 2′-O-methyl, a phosphorothioate, a phosphonoacetate, a thiophosphonoacetate, a 2′-O-methyl-3′-phosphorothioate, a 2′-O-methyl-3′-phosphonoacetate, a 2′-O-methyl-3′-thiophosphonoacetate, a 2′-deoxy-3′-phosphonoacetate, a 2′-deoxy-3′-thiophosphonoacetate, or a combination thereof.

[0048] In certain embodiments, provided herein are guide nucleic acids comprising a spacer sequence at least partially complementary to a site (1) within one or more genes that codes for a subunit of an HLA-1 protein, (2) within one or more genes coding for a subunit of an HLA-2 protein or a transcription factor regulating the expression of one or more subunits of an HLA-2 protein, and/or (3) within one or more genes that codes for a subunit of a TCR protein.

[0049] In certain embodiments, the one or more guide nucleic acids can be complexed with one or more nucleases, e.g., a nucleic acid-guided nuclease complex. In certain embodiments, provided herein are nucleic acid-guided nuclease complexes comprising a nucleic acid-guided nuclease and a compatible guide nucleic acid comprising a spacer sequence at least partially complementary to a site (1) within one or more genes that codes for a subunit of an HLA-1 protein, (2) within one or more genes coding for a subunit of an HLA-2 protein or a transcription factor regulating the expression of one or more subunits of an HLA-2 protein, and/or (3) within one or more genes that codes for a subunit of a TCR protein. In certain embodiments, the one or more guide nucleic acids, one or more nucleic acid guided nucleases, and/or the one or more nucleic acid-guided nucleases may further comprise a one or more additives that stabilize the nucleic acid-guided nuclease complex.

[0050] Such cells and/or populations of cells with lowered immunogenicity can be used for a variety of purposes, one such purpose can be a CAR T cell.

### A. Compositions Comprising Cells

### 1. Cells Comprising Genomic Modifications

[0051] In certain embodiments, provided herein are compositions comprising cells comprising one or more genomic modifications that reduce or eliminate an immune response to the cells in an allogeneic host. The one or more genomic modifications can alter the surface expression of one or more antigens affecting the immunogenicity of the one or more modified cells, e.g., by partially or completely inactivating a gene that codes for the antigen, or part of the antigen. In certain embodiments, the cell comprising one or more genomic modifications are generated from an initial cell not comprising genomic modifications affecting immunogenicity, e.g., a primary cell or a stem cell. In certain embodiments, an initial, unmodified, cell is modified so that all desired genetic modifications are introduced into the cell. In other embodiments, a sequential process is used, e.g., a cell is modified so that part of the desired modifications is introduced, then one or more of its progeny is further modified; this sequential approach can be two steps, three steps, four steps, or more. That is, a cell comprising one or more genomic modifications is, optionally expanded and used as a starting point for introduction of one or more additional genomic modifications. In certain embodiments wherein the cell comprises a stem cell, the stem cell can be differentiated before and/or after introduction of one or more genomic modifications. Additional methods are described in the Methods for reducing immunogenicity of cells section below. In certain embodiments, a composition comprising the one or more cells comprising one or more genomic modifications further comprises a pharmaceutically acceptable excipient.

a. Cells Comprising Modifications that Result in Partial or Complete Inactivation of a Gene Coding for a Subunit of HLA-1

[0052] In certain embodiments, provided herein are compositions comprising a cell comprising a first genomic modification in a gene that codes for a subunit of an HLA-1 protein. In certain embodiments, the first genomic modification partially or completely inactivates the gene that codes for a subunit of an HLA-1 protein. In certain embodiments, the first genomic modification completely inactivates the gene that codes for a subunit of an HLA-1 protein. In certain embodiments, the first genomic modification reduces or eliminates surface expression of active (immunogenic) HLA-1 proteins. In certain embodiments, the first genomic modification completely eliminates surface expression of active (immunogenic) HLA-1 proteins. In certain embodiments, the gene that codes for a subunit of an HLA-1 protein comprises a B2M gene. In certain embodiments, the first genomic modification comprises a substitution, an insertion, a deletion, a nonsense mutation, a truncation, or a combination thereof. In certain embodiments, the first genomic modification comprises insertion of heterologous DNA, e.g., a transgene, for example a transgene comprising a polynucleotide coding for a B2M-fusion protein, such as a B2M-HLA fusion protein, e.g., a B2M-HLA-E fusion protein or a B2M-HLA-G fusion protein.

[0053] In certain embodiments, the cell is a human cell, such as human stem cell or human immune cell, such as an immune cell comprising a neutrophil, cosinophil, basophil, mast cell, monocyte, macrophage, dendritic cell, natural killer cell, or a lymphocyte. In a preferred embodiment, the human immune cell is a T cell. In certain embodiments, the T cell comprises a chimeric antigen receptor (CAR) T cell. In certain embodiments, the CAR T cell expresses a plurality of different CARs, e.g., two different CARs (dual CAR T cell). In certain embodiments, the human cell is a human stem cell comprising a human pluripotent stem cell, multipotent stem cell, embryonic stem cell, induced pluripotent stem cell, hematopoietic stem cell, or a CD34+ cell. In a preferred embodiment, the cell is a hematopoietic stem cell. In a more preferred embodiment, the cell is a CD34+ stem cell. In an even more preferred embodiment, the cell is an induced pluripotent stem cell (iPSC).

[0054] In certain embodiments, the cell further comprises one or more nucleic acid-guided nucleases, one or more guide nucleic acids, and/or one or more polynucleotides encoding the one or more nucleic acid-guided nucleases and/or guide nucleic acids. In a preferred embodiment, the cell comprises a nucleic acid-guided nuclease complexed with a gRNA. In certain embodiments, one or more of the nucleic acid-guided nucleases (see Cas nucleases section below) are complexed with one or more of the guide nucleic acids (see Guide nucleic acids section below). In certain embodiments, the nuclease comprises a Type V nuclease. In a preferred embodiment, the nuclease comprises a Type V-A nuclease. In an even more preferred embodiment, the nuclease comprises MAD7, e.g., MAD7 comprising one or more nuclear localization signals (NLS), for example one to four NLS, preferably four NLS, more preferably one N-terminal NLS and three C-terminal NLS. In certain embodiments, the cell further comprises a donor template, such as a donor template described herein, e.g., a donor template comprising a polynucleotide coding for one or more CARs or portions thereof.

[0055] In certain embodiments, the cell further comprises a second genomic modification comprising a first transgene inserted into the genome. The first transgene can be inserted into any suitable location in the genome of the cell. In certain embodiments, the first transgene is inserted into a safe harbor site. The safe harbor site can be any suitable safe harbor site (see Genomic safe harbors section below). In certain embodiments, the safe harbor site comprises an AAVS1 or Rosa 26 locus. In certain embodiments the safe harbor site comprises any one of SEQ ID NOS: 2020-2043. In preferred embodiments, the first transgene is inserted into the gene that codes for the subunit of an HLA-1 protein, e.g., a B2M gene. In certain embodiments, the first transgene comprises a polynucleotide coding for B2M fusion protein, such as a B2M-HLA-1 subunit fusion protein. In certain embodiments, the HLA-1 subunit comprises HLA-C, HLA-E, or HLA-G, preferably HLA-E or HLA-G. In a preferred embodiment the subunit is HLA-E. In a more preferred embodiment, the subunit is HLA-G. Additionally or alternatively, the cell can comprise a transgene comprising a polynucleotide coding for a CAR or portion thereof. In certain embodiments, the transgene comprises a polynucleotide coding for a dual CAR or portions thereof, e.g., a CAR or portion thereof fusion protein. In certain embodiments, the dual CAR comprises a first CAR or portion thereof and a second CAR or portion thereof, wherein the second CAR or portion thereof is different from the first CAR or portion thereof. In certain embodiments, the CAR or portion thereof comprises a polypeptide that binds at least one of B7H3, BCMA, GPRC5D, CD8, CD8a, CD19, CD20, CD22, CD28, 4-1BB, or CD3zeta. In a preferred embodiment, the CAR or portion thereof comprises a polypeptide at least 60, at least 70, at least 80, at least 90, at least 95, at least 99%, or 100% identical to any one of the amino acid sequences of SEQ ID NOs: 86-124. In a more preferred embodiment, the CAR or portion thereof comprises a polypeptide that binds at least one of B7H3, BCMxA, GPRC5D, CD8, CD8a, CD20, CD22, CD28, 4-1BB, or CD3zeta. In an even more preferred embodiment, the CAR or portion thereof comprises a polypeptide at least 60, at least 70, at least 80, at least 90, at least 95, at least 99%, or 100% identical to any one of the amino acid sequences of SEQ ID NOs: 86-104 or 116-124.

b. Cells Comprising Modifications that Result in Partial or Complete Inactivation of a Gene Coding for a Subunit of HLA-1 and HLA-2

[0056] In certain embodiments, provided herein are compositions comprising a cell comprising a first genomic modification in a gene that codes for a subunit of an HLA-1 protein, as described above, and a second genomic modification in a gene that codes for a subunit of an HLA-2 protein or a transcription factor regulating the expression of one or more subunits of an HLA-2 protein. In certain embodiments, the first genomic modification partially or completely inactivates the gene that codes for a subunit of an HLA-1 protein and/or the second genomic modification partially or completely inactivates the gene that codes for a subunit of an HLA-2 protein or transcription factor regulating the expression of one or more subunits of an HLA-2 protein. In certain embodiments, the first genomic modification completely inactivates the gene that codes for a subunit of an HLA-1 protein and/or the second genomic modification partially or completely inactivates the gene that codes for a subunit of an HLA-2 protein or transcription factor regulating the expression of one or more subunits of an HLA-2 protein. In certain embodiments, the first and/or second genomic modification reduces or eliminates surface expression of active (immunogenic) HLA-1 and/or HLA-2 proteins. In certain embodiments, the first and/or second genomic modification completely eliminates surface expression of active (immunogenic) HLA-1 and/or HLA-2 proteins. In certain embodiments, the gene that codes for a subunit of an HLA-1 protein comprises a B2M gene. In certain embodiments, the gene that codes for a transcription factor regulating the expression of one or more subunits of an HLA-2 protein comprises a CIITA gene. In certain embodiments, the first and/or second genomic modification comprises a substitution, an insertion, a deletion, a nonsense mutation, a truncation, or a combination thereof. In certain embodiments, the first genomic modification comprises insertion of heterologous DNA, e.g., a transgene, for example a transgene comprising a polynucleotide coding for a B2M-fusion protein, such as a B2M-HLA fusion protein, e.g., a B2M-HLA-E fusion protein or a B2M-HLA-G fusion protein.

[0057] In certain embodiments, the cell is a human cell, such as human stem cell or human immune cell, such as an immune cell comprising a neutrophil, cosinophil, basophil, mast cell, monocyte, macrophage, dendritic cell, natural killer cell, or a lymphocyte. In a preferred embodiment, the human immune cell is a T cell. In certain embodiments, the T cell comprises a chimeric antigen receptor (CAR) T cell. In certain embodiments, the CAR T cell expresses a plurality of different CARs, e.g., two different CARs (dual CAR T cell). In certain embodiments, the human cell is a human stem cell comprising a human pluripotent stem cell, multipotent stem cell, embryonic stem cell, induced pluripotent stem cell, hematopoietic stem cell, or a CD34+ cell. In a preferred embodiment, the cell is a hematopoietic stem cell. In a more preferred embodiment, the cell is a CD34+ stem cell. In an even more preferred embodiment, the cell is an induced pluripotent stem cell (iPSC).

[0058] In certain embodiments, the cell further comprises one or more nucleic acid-guided nucleases, one or more guide nucleic acids, and/or one or more polynucleotides encoding the one or more nucleic acid-guided nucleases and/or guide nucleic acids. In a preferred embodiment, the cell comprises a nucleic acid-guided nuclease complexed with a gRNA. In certain embodiments, one or more of the nucleic acid-guided nucleases (see Cas nucleases section below) are complexed with one or more of the guide nucleic acids (see Guide nucleic acids section below). In certain embodiments, the nuclease comprises a Type V nuclease. In a preferred embodiment, the nuclease comprises a Type V-A nuclease. In an even more preferred embodiment, the nuclease comprises MAD7, e.g., MAD7 comprising one or more nuclear localization signals (NLS), for example one to four NLS, preferably four NLS, more preferably one N-terminal NLS and three C-terminal NLS. In certain embodiments, the cell further comprises a donor template, such as a donor template described herein, e.g., a donor template comprising a polynucleotide coding for one or more CARs or portions thereof.

[0059] In certain embodiments, the cell further comprises a third genomic modification comprising a first transgene inserted into the genome. The first transgene can be inserted into any suitable location in the genome of the cell. In certain embodiments, the first transgene is inserted into a safe harbor site. The safe harbor site can be any suitable safe harbor site (see Genomic safe harbors section below). In certain embodiments, the safe harbor site comprises an AAVS1 or Rosa 26 locus. In certain embodiments the safe harbor site comprises any one of SEQ ID NOS: 2020-2043. In preferred embodiments, the first transgene is inserted into the gene that codes for the subunit of an HLA-1 protein, e.g., a B2M gene. In certain embodiments, the first transgene comprises a polynucleotide coding for B2M fusion protein, such as a B2M-HLA-1 subunit fusion protein. In certain embodiments, the HLA-1 subunit comprises HLA-C, HLA-E, or HLA-G, preferably HLA-E or HLA-G. In a preferred embodiment the subunit is HLA-E. In a more preferred embodiment, the subunit is HLA-G. Additionally or alternatively, the cell can comprise a transgene comprising a polynucleotide coding for a CAR or portion thereof. In certain embodiments, the transgene comprises a polynucleotide coding for a dual CAR or portions thereof, e.g., a CAR or portion thereof fusion protein. In certain embodiments, the dual CAR comprises a first CAR or portion thereof and a second CAR or portion thereof, wherein the second CAR or portion thereof is different from the first CAR or portion thereof. In certain embodiments, the CAR or portion thereof comprises a polypeptide that binds at least one of B7H3, BCMA, GPRC5D, CD8, CD8a, CD19, CD20, CD22, CD28, 4-1BB, or CD3zeta. In a preferred embodiment, the CAR or portion thereof comprises a polypeptide at least 60, at least 70, at least 80, at least 90, at least 95, at least 99%, or 100% identical to any one of the amino acid sequences of SEQ ID NOs: 86-124. In a more preferred embodiment, the CAR or portion thereof comprises a polypeptide that binds at least one of B7H3, BCMxA, GPRC5D, CD8, CD8a, CD20, CD22, CD28, 4-1BB, or CD3zeta. In an even more preferred embodiment, the CAR or portion thereof comprises a polypeptide at least 60, at least 70, at least 80, at least 90, at least 95, at least 99%, or 100% identical to any one of the amino acid sequences of SEQ ID NOs: 86-104 or 116-124.

c. Cells Comprising Modifications that Result in Partial or Complete Inactivation of a Gene Coding for a Subunit of HLA-1, HLA-2, and TCR

[0060] In certain embodiments, provided herein are compositions comprising a cell comprising a first genomic modification in a gene that codes for a subunit of an HLA-1 protein, a second genomic modification in a gene that codes for a subunit of an HLA-2 protein or a transcription factor regulating the expression of one or more subunits of an HLA-2 protein, as described above, and a third genomic modification in a gene that codes for a subunit of a TCR protein. In certain embodiments, the first genomic modification partially or completely inactivates the gene that codes for a subunit of an HLA-1 protein, the second genomic modification partially or completely inactivates the gene that codes for a subunit of an HLA-2 protein or transcription factor regulating the expression of one or more subunits of an HLA-2 protein, and/or the third genomic modification partially or completely inactivates the gene that codes for a subunit of a TCR protein. In certain embodiments, the first genomic modification completely inactivates the gene that codes for a subunit of an HLA-1 protein, the second genomic modification partially or completely inactivates the gene that codes for a subunit of an HLA-2 protein or transcription factor regulating the expression of one or more subunits of an HLA-2 protein, and/or the third genomic modification partially or completely inactivates the gene that codes for a subunit of a TCR protein. In certain embodiments, the first, second, and/or third genomic modification reduces or eliminates surface expression of active (immunogenic) HLA-1, HLA-2 proteins, and/or TCR proteins. In certain embodiments, the first, second, and/or third genomic modifications completely eliminate surface expression of active (immunogenic) HLA-, HLA-2, and/or TCR proteins. In certain embodiments, the gene that codes for a subunit of an HLA-1 protein comprises a B2M gene. In certain embodiments, the gene that codes for a transcription factor regulating the expression of one or more subunits of an HLA-2 protein comprises a CIITA gene. In certain embodiments, the subunit of a TCR protein comprises an alpha or a beta subunit. In certain embodiments, the subunit of a TCR protein is a TRAC, TRBC, CD3E, CD3D, CD3G, or CD3Z protein. In certain embodiments, the subunit of a TCR protein comprises an alpha subunit. In certain embodiment, the gene that codes for a subunit of a TCR protein comprises a TRAC gene. In certain embodiments, the first, second, and/or third genomic modifications comprise a substitution, an insertion, a deletion, a nonsense mutation, a truncation, or a combination thereof. In certain embodiments, the first genomic modification comprises insertion of heterologous DNA, e.g., a transgene, for example a transgene comprising a polynucleotide coding for a B2M-fusion protein, such as a B2M-HLA fusion protein, e.g., a B2M-HLA-E fusion protein or a B2M-HLA-G fusion protein. In certain embodiments, the third genomic modification comprises insertion of heterologous DNA, e.g., a transgene, for example a polynucleotide coding for a CAR protein or a dual CAR protein.

[0061] In certain embodiments, the cell is a human cell, such as human stem cell or human immune cell, such as an immune cell comprising a neutrophil, cosinophil, basophil, mast cell, monocyte, macrophage, dendritic cell, natural killer cell, or a lymphocyte. In a preferred embodiment, the human immune cell is a T cell. In certain embodiments, the T cell comprises a chimeric antigen receptor (CAR) T cell. In certain embodiments, the CAR T cell expresses a plurality of different CARs, e.g., two different CARs (dual CAR T cell). In certain embodiments, the human cell is a human stem cell comprising a human pluripotent stem cell, multipotent stem cell, embryonic stem cell, induced pluripotent stem cell, hematopoietic stem cell, or a CD34+ cell. In a preferred embodiment, the cell is a hematopoietic stem cell. In a more preferred embodiment, the cell is a CD34+ stem cell. In an even more preferred embodiment, the cell is an induced pluripotent stem cell (iPSC).

[0062] In certain embodiments, the cell further comprises one or more nucleic acid-guided nucleases, one or more guide nucleic acids, and/or one or more polynucleotides encoding the one or more nucleic acid-guided nucleases and/or guide nucleic acids. In a preferred embodiment, the cell comprises a nucleic acid-guided nuclease complexed with a gRNA. In certain embodiments, one or more of the nucleic acid-guided nucleases (see Cas nucleases section below) are complexed with one or more of the guide nucleic acids (see Guide nucleic acids section below). In certain embodiments, the nuclease comprises a Type V nuclease. In a preferred embodiment, the nuclease comprises a Type V-A nuclease. In an even more preferred embodiment, the nuclease comprises MAD7, e.g., MAD7 comprising one or more nuclear localization signals (NLS), for example one to four NLS, preferably four NLS, more preferably one N-terminal NLS and three C-terminal NLS. In certain embodiments, the cell further comprises a donor template, such as a donor template described herein, e.g., a donor template comprising a polynucleotide coding for one or more CARs or portions thereof.

[0063] In certain embodiments, the cell further comprises a fourth genomic modification comprising a first transgene inserted into the genome. The first transgene can be inserted into any suitable location in the genome of the cell. In certain embodiments, the first transgene is inserted into a safe harbor site. The safe harbor site can be any suitable safe harbor site (see Genomic safe harbors section below). In certain embodiments, the safe harbor site comprises an AAVS1 or Rosa 26 locus. In certain embodiments the safe harbor site comprises any one of SEQ ID NOs: 2020-2043. In preferred embodiments, the first transgene is inserted into the gene that codes for the subunit of an HLA-1 protein, e.g., a B2M gene. In certain embodiments, the first transgene comprises a polynucleotide coding for B2M fusion protein, such as a B2M-HLA-1 subunit fusion protein. In certain embodiments, the HLA-1 subunit comprises HLA-C, HLA-E, or HLA-G, preferably HLA-E or HLA-G. In a preferred embodiment the subunit is HLA-E. In a more preferred embodiment, the subunit is HLA-G. Additionally or alternatively, the cell can comprise a transgene comprising a polynucleotide coding for a CAR or portion thereof. In a preferred embodiment, the transgene comprising a polynucleotide coding for a CAR or portion thereof is inserted into the gene that codes for the subunit of a TCR protein, e.g., a TRAC gene. In certain embodiments, the transgene comprises a polynucleotide coding for a dual CAR or portions thereof, e.g., a CAR or portion thereof fusion protein. In certain embodiments, the dual CAR comprises a first CAR or portion thereof and a second CAR or portion thereof, wherein the second CAR or portion thereof is different from the first CAR or portion thereof. In certain embodiments, the CAR or portion thereof comprises a polypeptide that binds at least one of B7H3, BCMA, GPRC5D, CD8, CD8a, CD19, CD20, CD22, CD28, 4-1BB, or CD3zeta. In a preferred embodiment, the CAR or portion thereof comprises a polypeptide at least 60, at least 70, at least 80, at least 90, at least 95, at least 99%, or 100% identical to any one of the amino acid sequences of SEQ ID NOs: 86-124. In a more preferred embodiment, the CAR or portion thereof comprises a polypeptide that binds at least one of B7H3, BCMxA, GPRC5D, CD8, CD8a, CD20, CD22, CD28, 4-1BB, or CD3zeta. In an even more preferred embodiment, the CAR or portion thereof comprises a polypeptide at least 60, at least 70, at least 80, at least 90, at least 95, at least 99%, or 100% identical to any one of the amino acid sequences of SEQ ID NOS: 86-104 or 116-124.

d. Cells Comprising Modifications that Result in Partial or Complete Inactivation of a Gene Coding for a Subunit of HLA-1 and TCR

[0064] In certain embodiments, provided herein are compositions comprising a cell comprising a first genomic modification in a gene that codes for a subunit of an HLA-1 protein, as described above, and a second genomic modification in a gene that codes for a subunit of a TCR protein. In certain embodiments, the first genomic modification partially or completely inactivates the gene that codes for a subunit of an HLA-1 protein and/or the second genomic modification partially or completely inactivates the gene that codes for a subunit of a TCR protein. In certain embodiments, the first genomic modification completely inactivates the gene that codes for a subunit of an HLA-1 protein and/or the second genomic modification partially or completely inactivates the gene that codes for a subunit of a TCR protein. In certain embodiments, the first and/or second genomic modification reduces or eliminates surface expression of active (immunogenic) HLA-1 and/or TCR proteins. In certain embodiments, the first and/or second genomic modifications completely eliminate surface expression of active (immunogenic) HLA- and/or TCR proteins. In certain embodiments, the gene that codes for a subunit of an HLA-1 protein comprises a B2M gene. In certain embodiments, the subunit of a TCR protein comprises an alpha or a beta subunit. In certain embodiments, the subunit of a TCR protein is a TRAC, TRBC, CD3E, CD3D, CD3G, or CD3Z protein. In certain embodiments, the subunit of a TCR protein comprises an alpha subunit. In certain embodiment, the gene that codes for a subunit of a TCR protein comprises a TRAC gene. In certain embodiments, the first and/or second genomic modification comprises a substitution, an insertion, a deletion, a nonsense mutation, a truncation, or a combination thereof. In certain embodiments, the first genomic modification comprises insertion of heterologous DNA, e.g., a transgene, for example a transgene comprising a polynucleotide coding for a CAR protein or a dual CAR protein.

[0065] In certain embodiments, the cell is a human cell, such as human stem cell or human immune cell, such as an immune cell comprising a neutrophil, cosinophil, basophil, mast cell, monocyte, macrophage, dendritic cell, natural killer cell, or a lymphocyte. In a preferred embodiment, the human immune cell is a T cell. In certain embodiments, the T cell comprises a chimeric antigen receptor (CAR) T cell. In certain embodiments, the CAR T cell expresses a plurality of different CARs, e.g., two different CARs (dual CAR T cell). In certain embodiments, the human cell is a human stem cell comprising a human pluripotent stem cell, multipotent stem cell, embryonic stem cell, induced pluripotent stem cell, hematopoietic stem cell, or a CD34+ cell. In a preferred embodiment, the cell is a hematopoietic stem cell. In a more preferred embodiment, the cell is a CD34+ stem cell. In an even more preferred embodiment, the cell is an induced pluripotent stem cell (iPSC).

[0066] In certain embodiments, the cell further comprises one or more nucleic acid-guided nucleases, one or more guide nucleic acids, and/or one or more polynucleotides encoding the one or more nucleic acid-guided nucleases and/or guide nucleic acids. In a preferred embodiment, the cell comprises a nucleic acid-guided nuclease complexed with a gRNA. In certain embodiments, one or more of the nucleic acid-guided nucleases (see Cas nucleases section below) are complexed with one or more of the guide nucleic acids (see Guide nucleic acids section below). In certain embodiments, the nuclease comprises a Type V nuclease. In a preferred embodiment, the nuclease comprises a Type V-A nuclease. In an even more preferred embodiment, the nuclease comprises MAD7, e.g., MAD7 comprising one or more nuclear localization signals (NLS), for example one to four NLS, preferably four NLS, more preferably one N-terminal NLS and three C-terminal NLS. In certain embodiments, the cell further comprises a donor template, such as a donor template described herein, e.g., a donor template comprising a polynucleotide coding for one or more CARs or portions thereof.

[0067] In certain embodiments, the cell further comprises a third genomic modification comprising a first transgene inserted into the genome. The first transgene can be inserted into any suitable location in the genome of the cell. In certain embodiments, the first transgene is inserted into a safe harbor site. The safe harbor site can be any suitable safe harbor site (see Genomic safe harbors section below). In certain embodiments, the safe harbor site comprises an AAVS1 or Rosa 26 locus. In certain embodiments the safe harbor site comprises any one of SEQ ID NOs: 2020-2043. In preferred embodiments, the first transgene is inserted into the gene that codes for the subunit of an HLA-1 protein, e.g., a B2M gene. In certain embodiments, the first transgene comprises a polynucleotide coding for B2M fusion protein, such as a B2M-HLA-1 subunit fusion protein. In certain embodiments, the HLA-1 subunit comprises HLA-C, HLA-E, or HLA-G, preferably HLA-E or HLA-G. In a preferred embodiment the subunit is HLA-E. In a more preferred embodiment, the subunit is HLA-G. Additionally or alternatively, the cell can comprise a transgene comprising a polynucleotide coding for a CAR or portion thereof. In a preferred embodiment, the transgene comprising a polynucleotide coding for a CAR or portion thereof is inserted into the gene that codes for the subunit of a TCR protein, e.g., a TRAC gene. In certain embodiments, the transgene comprises a polynucleotide coding for a dual CAR or portions thereof, e.g., a CAR or portion thereof fusion protein. In certain embodiments, the dual CAR comprises a first CAR or portion thereof and a second CAR or portion thereof, wherein the second CAR or portion thereof is different from the first CAR or portion thereof. In certain embodiments, the CAR or portion thereof comprises a polypeptide that binds at least one of B7H3, BCMA, GPRC5D, CD8, CD8a, CD19, CD20, CD22, CD28, 4-1BB, or CD3zeta. In a preferred embodiment, the CAR or portion thereof comprises a polypeptide at least 60, at least 70, at least 80, at least 90, at least 95, at least 99%, or 100% identical to any one of the amino acid sequences of SEQ ID NOs: 86-124. In a more preferred embodiment, the CAR or portion thereof comprises a polypeptide that binds at least one of B7H3, BCMxA, GPRC5D, CD8, CD8a, CD20, CD22, CD28, 4-1BB, or CD3zeta. In an even more preferred embodiment, the CAR or portion thereof comprises a polypeptide at least 60, at least 70, at least 80, at least 90, at least 95, at least 99%, or 100% identical to any one of the amino acid sequences of SEQ ID NOS: 86-104 or 116-124.

e. Cells Comprising Modifications that Result in Partial or Complete Inactivation of a Gene Coding for a Subunit of HLA-2

[0068] In certain embodiments, provided herein are compositions comprising a cell comprising a first genomic modification in a gene that codes for a subunit of an HLA-2 protein or a transcription factor regulating the expression of one or more subunits of an HLA-2 protein. In certain embodiments, the first genomic modification partially or completely inactivates the gene that codes for a subunit of an HLA-2 protein or a transcription factor regulating the expression of one or more subunits of an HLA-2 protein. In certain embodiments, the first genomic modification completely inactivates the gene that codes for a subunit of an HLA-2 protein or a transcription factor regulating the expression of one or more subunits of an HLA-2 protein. In certain embodiments, the first genomic modification reduces or eliminates surface expression of active (immunogenic) HLA-2 proteins. In certain embodiments, the first genomic modification completely eliminates surface expression of active (immunogenic) HLA-2 proteins. In certain embodiments, the gene that codes for a transcription factor regulating the expression of one or more subunits of an HLA-2 protein comprises a CIITA gene. In certain embodiments, the first genomic modification comprises a substitution, an insertion, a deletion, a nonsense mutation, a truncation, or a combination thereof.

[0069] In certain embodiments, the cell is a human cell, such as human stem cell or human immune cell, such as an immune cell comprising a neutrophil, cosinophil, basophil, mast cell, monocyte, macrophage, dendritic cell, natural killer cell, or a lymphocyte. In a preferred embodiment, the human immune cell is a T cell. In certain embodiments, the T cell comprises a chimeric antigen receptor (CAR) T cell. In certain embodiments, the CAR T cell expresses a plurality of different CARS, e.g., two different CARs (dual CAR T cell). In certain embodiments, the human cell is a human stem cell comprising a human pluripotent stem cell, multipotent stem cell, embryonic stem cell, induced pluripotent stem cell, hematopoietic stem cell, or a CD34+ cell. In a preferred embodiment, the cell is a hematopoietic stem cell. In a more preferred embodiment, the cell is a CD34+ stem cell. In an even more preferred embodiment, the cell is an induced pluripotent stem cell (iPSC).

[0070] In certain embodiments, the cell further comprises one or more nucleic acid-guided nucleases, one or more guide nucleic acids, and/or one or more polynucleotides encoding the one or more nucleic acid-guided nucleases and/or guide nucleic acids. In a preferred embodiment, the cell comprises a nucleic acid-guided nuclease complexed with a gRNA. In certain embodiments, one or more of the nucleic acid-guided nucleases (see Cas nucleases section below) are complexed with one or more of the guide nucleic acids (see Guide nucleic acids section below). In certain embodiments, the nuclease comprises a Type V nuclease. In a preferred embodiment, the nuclease comprises a Type V-A nuclease. In an even more preferred embodiment, the nuclease comprises MAD7, e.g., MAD7 comprising one or more nuclear localization signals (NLS), for example one to four NLS, preferably four NLS, more preferably one N-terminal NLS and three C-terminal NLS. In certain embodiments, the cell further comprises a donor template, such as a donor template described herein, e.g., a donor template comprising a polynucleotide coding for one or more CARs or portions thereof.

[0071] In certain embodiments, the cell further comprises a second genomic modification comprising a first transgene inserted into the genome. The first transgene can be inserted into any suitable location in the genome of the cell. In certain embodiments, the first transgene is inserted into a safe harbor site. The safe harbor site can be any suitable safe harbor site (see Genomic safe harbors section below). In certain embodiments, the safe harbor site comprises an AAVS1 or Rosa 26 locus. In certain embodiments the safe harbor site comprises any one of SEQ ID NOS: 2020-2043. In certain embodiments, the first transgene comprises a polynucleotide coding for B2M fusion protein, such as a B2M-HLA-1 subunit fusion protein. In certain embodiments, the HLA-1 subunit comprises HLA-C, HLA-E, or HLA-G, preferably HLA-E or HLA-G. In a preferred embodiment the subunit is HLA-E. In a more preferred embodiment, the subunit is HLA-G. Additionally or alternatively, the cell can comprise a transgene comprising a polynucleotide coding for a CAR or portion thereof. In certain embodiments, the transgene comprises a polynucleotide coding for a dual CAR or portions thereof, e.g., a CAR or portion thereof fusion protein. In certain embodiments, the dual CAR comprises a first CAR or portion thereof and a second CAR or portion thereof, wherein the second CAR or portion thereof is different from the first CAR or portion thereof. In certain embodiments, the CAR or portion thereof comprises a polypeptide that binds at least one of B7H3, BCMA, GPRC5D, CD8, CD8a, CD19, CD20, CD22, CD28, 4-1BB, or CD3zeta. In a preferred embodiment, the CAR or portion thereof comprises a polypeptide at least 60, at least 70, at least 80, at least 90, at least 95, at least 99%, or 100% identical to any one of the amino acid sequences of SEQ ID NOs: 86-124. In a more preferred embodiment, the CAR or portion thereof comprises a polypeptide that binds at least one of B7H3, BCMxA, GPRC5D, CD8, CD8a, CD20, CD22, CD28, 4-1BB, or CD3zeta. In an even more preferred embodiment, the CAR or portion thereof comprises a polypeptide at least 60, at least 70, at least 80, at least 90, at least 95, at least 99%, or 100% identical to any one of the amino acid sequences of SEQ ID NOs: 86-104 or 116-124.

f. Cells Comprising Modifications that Result in Partial or Complete Inactivation of a Gene Coding for a Subunit of HLA-2 and TCR

[0072] In certain embodiments, provided herein are compositions comprising a cell comprising a first genomic modification in a gene that codes for a subunit of an HLA-2 protein or a transcription factor regulating the expression of one or more subunits of an HLA-2 protein, as described above, and a second genomic modification in a gene that codes for a subunit of a TCR protein. In certain embodiments, the first genomic modification partially or completely inactivates the gene that codes for a subunit of an HLA-2 protein or a transcription factor regulating the expression of one or more subunits of an HLA-2 protein, and/or the second genomic modification partially or completely inactivates the gene that codes for a subunit of a TCR protein. In certain embodiments, the first genomic modification completely inactivates the gene that codes for a subunit of an HLA-2 protein or a transcription factor regulating the expression of one or more subunits of an HLA-2 protein, and/or the second genomic modification completely inactivates the gene that codes for a subunit of a TCR protein. In certain embodiments, the first and/or second genomic modification reduces or eliminates surface expression of active (immunogenic) HLA-2 and/or TCR proteins. In certain embodiments, the first and/or second genomic modification completely eliminates surface expression of active (immunogenic) HLA-2 and/or TCR proteins. In certain embodiments, the gene that codes for a transcription factor regulating the expression of one or more subunits of an HLA-2 protein comprises a CIITA gene. In certain embodiments, the subunit of a TCR protein comprises an alpha or a beta subunit. In certain embodiments, the subunit of a TCR protein is a TRAC, TRBC, CD3E, CD3D, CD3G, or CD3Z protein. In certain embodiments, the subunit of a TCR protein comprises an alpha subunit. In certain embodiment, the gene that codes for a subunit of a TCR protein comprises a TRAC gene. In certain embodiments, the first genomic modification comprises a substitution, an insertion, a deletion, a nonsense mutation, a truncation, or a combination thereof. In certain embodiments, the second genomic modification comprises insertion of heterologous DNA, e.g., a transgene, for example a polynucleotide coding for a CAR protein or a dual CAR protein.

[0073] In certain embodiments, the cell is a human cell, such as human stem cell or human immune cell, such as an immune cell comprising a neutrophil, cosinophil, basophil, mast cell, monocyte, macrophage, dendritic cell, natural killer cell, or a lymphocyte. In a preferred embodiment, the human immune cell is a T cell. In certain embodiments, the T cell comprises a chimeric antigen receptor (CAR) T cell. In certain embodiments, the CAR T cell expresses a plurality of different CARs, e.g., two different CARs (dual CAR T cell). In certain embodiments, the human cell is a human stem cell comprising a human pluripotent stem cell, multipotent stem cell, embryonic stem cell, induced pluripotent stem cell, hematopoietic stem cell, or a CD34+ cell. In a preferred embodiment, the cell is a hematopoietic stem cell. In a more preferred embodiment, the cell is a CD34+ stem cell. In an even more preferred embodiment, the cell is an induced pluripotent stem cell (iPSC).

[0074] In certain embodiments, the cell further comprises one or more nucleic acid-guided nucleases, one or more guide nucleic acids, and/or one or more polynucleotides encoding the one or more nucleic acid-guided nucleases and/or guide nucleic acids. In a preferred embodiment, the cell comprises a nucleic acid-guided nuclease complexed with a gRNA. In certain embodiments, one or more of the nucleic acid-guided nucleases (see Cas nucleases section below) are complexed with one or more of the guide nucleic acids (see Guide nucleic acids section below). In certain embodiments, the nuclease comprises a Type V nuclease. In a preferred embodiment, the nuclease comprises a Type V-A nuclease. In an even more preferred embodiment, the nuclease comprises MAD7, e.g., MAD7 comprising one or more nuclear localization signals (NLS), for example one to four NLS, preferably four NLS, more preferably one N-terminal NLS and three C-terminal NLS. In certain embodiments, the cell further comprises a donor template, such as a donor template described herein, e.g., a donor template comprising a polynucleotide coding for one or more CARs or portions thereof.

[0075] In certain embodiments, the cell further comprises a second genomic modification comprising a first transgene inserted into the genome. The first transgene can be inserted into any suitable location in the genome of the cell. In certain embodiments, the first transgene is inserted into a safe harbor site. The safe harbor site can be any suitable safe harbor site (see Genomic safe harbors section below). In certain embodiments, the safe harbor site comprises an AAVS1 or Rosa 26 locus. In certain embodiments the safe harbor site comprises any one of SEQ ID NOS: 2020-2043. In certain embodiments, the first transgene comprises a polynucleotide coding for B2M fusion protein, such as a B2M-HLA-1 subunit fusion protein. In certain embodiments, the HLA-1 subunit comprises HLA-C, HLA-E, or HLA-G, preferably HLA-E or HLA-G. In a preferred embodiment the subunit is HLA-E. In a more preferred embodiment, the subunit is HLA-G. Additionally or alternatively, the cell can comprise a transgene comprising a polynucleotide coding for a CAR or portion thereof. In certain embodiments, the first transgene is inserted into a TRAC gene. In certain embodiments, the transgene comprises a polynucleotide coding for a dual CAR or portions thereof, e.g., a CAR or portion thereof fusion protein. In certain embodiments, the dual CAR comprises a first CAR or portion thereof and a second CAR or portion thereof, wherein the second CAR or portion thereof is different from the first CAR or portion thereof. In certain embodiments, the CAR or portion thereof comprises a polypeptide that binds at least one of B7H3, BCMA, GPRC5D, CD8, CD8a, CD19, CD20, CD22, CD28, 4-1BB, or CD3zeta. In a preferred embodiment, the CAR or portion thereof comprises a polypeptide at least 60, at least 70, at least 80, at least 90, at least 95, at least 99%, or 100% identical to any one of the amino acid sequences of SEQ ID NOs: 86-124. In a more preferred embodiment, the CAR or portion thereof comprises a polypeptide that binds at least one of B7H3, BCMxA, GPRC5D, CD8, CD8a, CD20, CD22, CD28, 4-1BB, or CD3zeta. In an even more preferred embodiment, the CAR or portion thereof comprises a polypeptide at least 60, at least 70, at least 80, at least 90, at least 95, at least 99%, or 100% identical to any one of the amino acid sequences of SEQ ID NOs: 86-104 or 116-124.

g. Cells Comprising Modifications that Result in Partial or Complete Inactivation of a Gene Coding for a Subunit of TCR

[0076] In certain embodiments, provided herein are compositions comprising a cell comprising a first genomic modification in a gene that codes for a subunit of a TCR protein. In certain embodiments, the first genomic modification partially or completely inactivates the gene that codes for a subunit of a TCR protein. In certain embodiments, the first genomic modification completely inactivates the gene that codes for a subunit of a TCR protein. In certain embodiments, the first genomic modification reduces or eliminates surface expression of active (immunogenic) TCR proteins. In certain embodiments, the first genomic modification completely eliminates surface expression of active (immunogenic) TCR proteins. In certain embodiments, the subunit of a TCR protein comprises an alpha or a beta subunit. In certain embodiments, the subunit of a TCR protein is a TRAC, TRBC, CD3E, CD3D, CD3G, or CD3Z protein. In certain embodiments, the subunit of a TCR protein comprises an alpha subunit. In certain embodiment, the gene that codes for a subunit of a TCR protein comprises a TRAC gene. In certain embodiments, the first genomic modification comprises a substitution, an insertion, a deletion, a nonsense mutation, a truncation, or a combination thereof. In certain embodiments, the first genomic modification comprises insertion of heterologous DNA, e.g., a transgene, for example a polynucleotide coding for a CAR protein or a dual CAR protein.

[0077] In certain embodiments, the cell is a human cell, such as human stem cell or human immune cell, such as an immune cell comprising a neutrophil, cosinophil, basophil, mast cell, monocyte, macrophage, dendritic cell, natural killer cell, or a lymphocyte. In a preferred embodiment, the human immune cell is a T cell. In certain embodiments, the T cell comprises a chimeric antigen receptor (CAR) T cell. In certain embodiments, the CAR T cell expresses a plurality of different CARS, e.g., two different CARs (dual CAR T cell). In certain embodiments, the human cell is a human stem cell comprising a human pluripotent stem cell, multipotent stem cell, embryonic stem cell, induced pluripotent stem cell, hematopoietic stem cell, or a CD34+ cell. In a preferred embodiment, the cell is a hematopoietic stem cell. In a more preferred embodiment, the cell is a CD34+ stem cell. In an even more preferred embodiment, the cell is an induced pluripotent stem cell (iPSC).

[0078] In certain embodiments, the cell further comprises one or more nucleic acid-guided nucleases, one or more guide nucleic acids, and/or one or more polynucleotides encoding the one or more nucleic acid-guided nucleases and/or guide nucleic acids. In a preferred embodiment, the cell comprises a nucleic acid-guided nuclease complexed with a gRNA. In certain embodiments, one or more of the nucleic acid-guided nucleases (see Cas nucleases section below) are complexed with one or more of the guide nucleic acids (see Guide nucleic acids section below). In certain embodiments, the nuclease comprises a Type V nuclease. In a preferred embodiment, the nuclease comprises a Type V-A nuclease. In an even more preferred embodiment, the nuclease comprises MAD7, e.g., MAD7 comprising one or more nuclear localization signals (NLS), for example one to four NLS, preferably four NLS, more preferably one N-terminal NLS and three C-terminal NLS. In certain embodiments, the cell further comprises a donor template, such as a donor template described herein, e.g., a donor template comprising a polynucleotide coding for one or more CARs or portions thereof.

[0079] In certain embodiments, the cell further comprises a second genomic modification comprising a first transgene inserted into the genome. The first transgene can be inserted into any suitable location in the genome of the cell. In certain embodiments, the first transgene is inserted into a safe harbor site. The safe harbor site can be any suitable safe harbor site (see Genomic safe harbors section below). In certain embodiments, the safe harbor site comprises an AAVS1 or Rosa 26 locus. In certain embodiments the safe harbor site comprises any one of SEQ ID NOS: 2020-2043. In certain embodiments, the first transgene comprises a polynucleotide coding for B2M fusion protein, such as a B2M-HLA-1 subunit fusion protein. In certain embodiments, the HLA-1 subunit comprises HLA-C, HLA-E, or HLA-G, preferably HLA-E or HLA-G. In a preferred embodiment the subunit is HLA-E. In a more preferred embodiment, the subunit is HLA-G. Additionally or alternatively, the cell can comprise a transgene comprising a polynucleotide coding for a CAR or portion thereof. In a preferred embodiment, the transgene comprising a polynucleotide coding for a CAR or portion thereof is inserted into the gene that codes for the subunit of a TCR protein, e.g., a TRAC gene. In certain embodiments, the transgene comprises a polynucleotide coding for a dual CAR or portions thereof, e.g., a CAR or portion thereof fusion protein. In certain embodiments, the dual CAR comprises a first CAR or portion thereof and a second CAR or portion thereof, wherein the second CAR or portion thereof is different from the first CAR or portion thereof. In certain embodiments, the CAR or portion thereof comprises a polypeptide that binds at least one of B7H3, BCMA, GPRC5D, CD8, CD8a, CD19, CD20, CD22, CD28, 4-1BB, or CD3zeta. In a preferred embodiment, the CAR or portion thereof comprises a polypeptide at least 60, at least 70, at least 80, at least 90, at least 95, at least 99%, or 100% identical to any one of the amino acid sequences of SEQ ID NOs: 86-124. In a more preferred embodiment, the CAR or portion thereof comprises a polypeptide that binds at least one of B7H3, BCMxA, GPRC5D, CD8, CD8a, CD20, CD22, CD28, 4-1BB, or CD3zeta. In an even more preferred embodiment, the CAR or portion thereof comprises a polypeptide at least 60, at least 70, at least 80, at least 90, at least 95, at least 99%, or 100% identical to any one of the amino acid sequences of SEQ ID NOs: 86-104 or 116-124.

h. Surface Proteins & CARs

[0080] In certain embodiments, the surface expression of a cell comprising a genomic modification in a gene that codes for a subunit of an HLA-1, HLA-2, and/or TCR protein demonstrates no more than 90, 80, 70, 60, 50, 40, 30, 20, 19, 18, 17, 16, 15, 14, 13, 12, 11, 10, 9, 8, 7, 6, 5, 4, 3, 2, or 1% of active (immunogenic) protein as compared to an un-engineered equivalent, preferably no more than 20%, more preferably no more than 10%, even more preferably no more than 5%, yet more preferably no more than 2%. In certain embodiments, endogenous, surface expressed HLA-1 protein can be measured using any suitable technique. In certain embodiments, the technique comprises ELISA, proximity ligation assays, pull downs, and/or flow cytometry.

[0081] In certain embodiments, provided herein are compositions comprising CARs. In certain embodiments, the CAR or portion thereof comprises a polypeptide that binds at least one of B7H3, BCMA, GPRC5D, CD8, CD8a, CD19, CD20, CD22, CD28, 4-1BB, CD3zeta, or a combination thereof. In certain embodiments, the CAR or portion thereof comprises a polypeptide at least 60, at least 70, at least 80, at least 90, at least 95, at least 99%, or 100% identical to any one of the amino acid sequences of SEQ ID NOs: 86-124. In a preferred embodiment, the CAR or portion thereof comprises a polypeptide that binds at least one of B7H3, BCMxA, GPRC5D, CD8, CD8a, CD20, CD22, CD28, 4-1BB, or CD3zeta. In a preferred embodiment, the CAR or portion thereof comprises a polypeptide at least 60, at least 70, at least 80, at least 90, at least 95, at least 99%, or 100% identical to any one of the amino acid sequences of SEQ ID NOs: 86-104 or 116-124. In certain embodiments, provided herein are composition comprising dual CARs comprising a first CAR or portion thereof and a second CAR or portion thereof, either separate, or connected via one or more polypeptide linkers. In certain embodiments where the dual CARs are separate, a first CAR or portion thereof can be inserted into a first suitable location in the genome and a second CAR or portion thereof can be inserted into a second suitable location in the genome and/or a polycistronic gene maybe be introduced into a suitable location in the genome comprising two or more CARs or portions thereof, wherein each CAR is expressed on the surface of the cell. In certain embodiments, the dual CAR comprises the same CAR polypeptide sequence. In a preferred embodiment, the dual CAR comprises different CAR polypeptide sequences.

TABLE 1
CARs

| SEQ | | |
|---|---|---|
| ID | | |
| NO | Antigen | Sequence |
| 86 | BCMA | EVQLVESGGGLVQPGGSLRLSCAASGNIFSDNLMGWFRQAPGKE |
| | | REFVAAINWNSRSTYYADSVKGRFTISADNSKNTAYLQMNSLKP |
| | | EDTAVYYCAKDLTMVRGVPDYWGQGTLVTVSS |
| 87 | BCMA | EVQLVESGGGLVQPGGSLRLSCAASGFTLGDYVMGWFRQAPGKE |
| | | REWVSVISSSGDFTSYADSVKGRFTISADNSKNTAYLQMNSLKP |
| | | EDTAVYYCASHYYDSSGTNWGQGTLVTVSS |
| 88 | BCMA | EVQLVESGGGLVQPGGSLRLSCAASGFTESSAIMGWFRQAPGKE |
| | | REFVSAITWNGTRTYYADSVKGRFTISADNSKNTAYLQMNSLKP |
| | | EDTAVYYCAKDLLEVGATPGNWGQGTLVTVSS |
| 89 | BCMA | EVQLLESGGGLVQPGGSLRLSCAASGFTFETYAMSWVRQAPGKG |
| | | LEWVSGISPSGGITTYADSVKGRFTISRDNSKNTLYLQMNSLRA |
| | | EDTAVYYCARREWWYDDWYLDYWGQGTLVTVSS |
| 90 | BCMA | EVQLLESGGGLVQPGGSLRLSCAASGFSFSTFAMSWVRQAPGKG |
| | | LEWVSAISGSGGSTSYADSVKGRFTISRDNSKNTLYLQMNSLRA |
| | | EDTAVYYCARRGWGSWSWYFDLWGQGTLVTVSS |
| 91 | BCMA | EVQLLESGGGLVQPGGSLRLSCAASGFTFGNYAMAWVRQAPGKG |
| | | LEWVSAISGSGGGTSYADSVKGRFTISRDNSKNTLYLQMNSLRA |
| | | EDTAVYYCARREWWYDDWYLDYWGQGTLVTVSS |
| 92 | BCMA | DIQMTQSPSSLSASVGDRVTITCRASQTIERRLNWYQQKPGKAP |
| | | KLLIYAASDLESGVPSRFSGSGSGTDFTLTISSLQPEDFATYYC |
| | | QQNNNWPTTFGQGTKVEIK |
| 93 | BCMA | DIQMTQSPSSLSASVGDRVTITCRASQTIGIYLNWYQQKPGKAP |
| | | KLLIYDASSLHSGVPSRFSGSGSGTDFTLTISSLQPEDFATYYC |
| | | QQSYSTPFTFGGGTKVEIK |
| 94 | BCMA | DIQMTQSPSSLSASVGDRVTITCRASQTIGDYLNWYQQKPGKAP |
| | | KLLIYAVTSRASGVPSRFSGSGSGTDFTLTISSLQPEDFATYYC |
| | | QQSYSTLTFGQGTKVEIK |
| 95 | B7H3 | EVQLVESGGGLVQPGGSLRLSCAASGIAFSIDIMGWFRQAPGKE |
| | | REFVAAVNWNGDSTYYADSVKGRFTISADNSKNTAYLQMNSLKP |
| | | EDTAVYYCATIDGSWREWGQGTLVTVSS |
| 96 | B7H3 | EVQLVESGGGLVQPGGSLRLSCAASGLREDDYWMGWFRQAPGKE |
| | | REFVSAINWSGVSTYYADSVKGRFTISADNSKNTAYLQMNSLKP |
| | | EDTAVYYCAARQYGEYWQAAGWGQGTLVTVSS |
| 97 | B7H3 | EVQLVESGGGLVQPGGSLRLSCAASGLTLDYYAMGWFRQAPGKE |
| | | REFVAGINNGRAITYYADSVKGRFTISADNSKNTAYLQMNSLKP |
| | | EDTAVYYCATIDGSWREWGQGTLVTVSS |
| 98 | B7H3 | EVQLLESGGGLVQPGGSLRLSCAASGFTFSNFPMSWVRQAPGKG |
| | | LEWVSAITGTGGSTYYADSVKGRFTISRDNSKNTLYLQMNSLRA |
| | | EDTAVYYCATRTGTTGTAFDIWGQGTLVTVSS |
| 99 | B7H3 | EVQLLESGGGLVQPGGSLRLSCAASGYTFSNYAMSWVRQAPGKG |
| | | LEWVSAVSRSGGSTYYADSVKGRFTISRDNSKNTLYLQMNSLRA |
| | | EDTAVYYCARDLGYYAFDFWGQGTLVTVSS |
| 100 | B7H3 | EVQLLESGGGLVQPGGSLRLSCAASGFTFSTYAMSWVRQAPGKG |
| | | LEWVSSISGSGGRTDYADSVKGRFTISRDNSKNTLYLQMNSLRA |
| | | EDTAVYYCARIRSRGSSGFDPWGQGTLVTVSS |
| 101 | B7H3 | DIQMTQSPSSLSASVGDRVTITCRASQNIGRYLNWYQQKPGKAP |
| | | KLLIYDASGLQSGVPSRFSGSGSGTDFTLTISSLQPEDFATYYC |
| | | QQSYSTPPWTFGGGTKVEIK |
| 102 | B7H3 | DIQMTQSPSSLSASVGDRVTITCRASQTIYRYLNWYQQKPGKAP |
| | | KLLIYHASNLQSGVPSRFSGSGSGTDFTLTISSLQPEDFATYYC |
| | | QQSYTFPRSFGGGTKVEIK |
| 103 | B7H3 | DIQMTQSPSSLSASVGDRVTITCRASQSVYSYLNWYQQKPGKAP |
| | | KLLIYETSNLQSGVPSRFSGSGSGTDFTLTISSLQPEDFATYYC |
| | | QQSFTSPLTFGGGTKVEIK |
| 104 | CD19 | EVQLLESGGGLVQPGGSLRLSCAASGFTFENYAMSWVRQAPGKG |
| | | LEWVSAISGSGGHTYYADSVKGRFTISRDNSKNTLYLQMNSLRA |
| | | EDTAVYYCAHSNKRTGHAFDIWGQGTLVTVSS |
| 105 | CD19 | EVQLLESGGGLVQPGGSLRLSCAASGFTFSRHAMSWVRQAPGKG |
| | | LEWVSAITGSGASTYYADSVKGRFTISRDNSKNTLYLQMNSLRA |
| | | EDTAVYYCARGGRREFHYGLDYWGQGTLVTVSS |
| 106 | CD19 | EVQLLESGGGLVQPGGSLRLSCAASGFTFGNYAMAWVRQAPGKG |
| | | LEWVSAISGNGGSTFYADSVKGRFTISRDNSKNTLYLQMNSLRA |
| | | EDTAVYYCARAGRILFDYWGQGTLVTVSS |
| 107 | CD19 | EVQLLESGGGLVQPGGSLRLSCAASGFTESTYAMSWVRQAPGKG |
| | | LEWVSAISRSGGNTYYADSVKGRFTISRDNSKNTLYLQMNSLRA |
| | | EDTAVYYCARVRMKGYTYFDPWGQGTLVTVSS |
| 108 | CD19 | EVQLLESGGGLVQPGGSLRLSCAASGFTFSHYGMSWVRQAPGKG |
| | | LEWVSSISGSGGSTYYVDSVKGRFTISRDNSKNTLYLQMNSLRA |
| | | EDTAVYYCARSKRLIHGLDVWGQGTLVTVSS |
| 109 | CD19 | EVQLLESGGGLVQPGGSLRLSCAASGFTFSRYTMSWVRQAPGKG |
| | | LEWVSTISGSGYSTYYADSVKGRFTISRDNSKNTLYLQMNSLRA |
| | | EDTAVYYCAHSNKRTGHAFDIWGQGTLVTVSS |
| 110 | CD19 | DIQMTQSPSSLSASVGDRVTITCRASQSVSTFLNWYQQKPGKAP |
| | | KLLIYGASILQSGVPSRFSGSGSGTDFTLTISSLQPEDFATYYC |
| | | QQSYTPPLTFGGGTKVEIK |
| 111 | CD19 | DIQMTQSPSSLSASVGDRVTITCRASQSVSRFLNWYQQKPGKAP |
| | | KLLIYAASVLQSGVPSRFSGSGSGTDFTLTISSLQPEDFATYYC |
| | | QQTYSPPLTFGGGTKVEIK |
| 112 | CD19 | DIQMTQSPSSLSASVGDRVTITCRASQSIRRYLNWYQQKPGKAP |
| | | KLLIYHTSRLQSGVPSRFSGSGSGTDFTLTISSLQPEDFATYYC |
| | | AQGWGRPVTFGQGTKVEIK |
| 113 | CD19 | DIQMTQSPSSLSASVGDRVTITCRASQTISSSLNWYQQKPGKAP |
| | | KLLIYGASSLRSGVPSRFSGSGSGTDFTLTISSLQPEDFATYYC |
| | | QQTYSNPITFGGGTKVEIK |
| 114 | CD19 | DIQMTQSPSSLSASVGDRVTITCRTSQSISTYLNWYQQKPGKAP |
| | | KLLIYGASALQTGVPSRFSGSGSGTDFTLTISSLQPEDFATYYC |
| | | QQSYTAPLTFGGGTKVEIK |
| 115 | CD19 | DIQMTQSPSSLSASVGDRVTITCRASQTISKYLNWYQQKPGKAP |
| | | KLLIYGASSLQSGVPSRFSGSGSGTDFTLTISSLQPEDFATYYC |
| | | QQSYSPPITFGGGTKVEIK |
| 116 | CD22 | EVQLVESGGGLVQPGGSLRLSCAASGIPSIRAMGWFRQAPGKER |
| | | EWVSSINSDGTSAFYADSVKGRFTISADNSKNTAYLQMNSLKPE |
| | | DTAVYYCARAYGRGTYDWGQGTLVTVSS |
| 117 | CD22 | EVQLVESGGGLVQPGGSLRLSCAASGFTFGEYAMGWFRQAPGKE |
| | | REFVASISRSGTLRAYADSVKGRFTISADNSKNTAYLQMNSLKP |
| | | EDTAVYYCAKESKDYFYMDVWGQGTLVTVSS |
| 118 | CD22 | EVQLVESGGGLVQPGGSLRLSCAASGRTYGMGWFRQAPGKEREF |
| | | VASVTSGGYTNYADSVKGRFTISADNSKNTAYLQMNSLKPEDTA |
| | | VYYCARGGGTSVRAFDIWGQGTLVTVSS |
| 119 | CD22 | EVQLLESGGGLVQPGGSLRLSCAASGFAFAAYDMGWVRQAPGKG |
| | | LEWVSSISGYGSTTYYADSVKGRFTISRDNSKNTLYLQMNSLRA |
| | | EDTAVYYCARHSGYGSSYGVLFAYWGQGTLVTVSS |
| 120 | CD22 | EVQLLESGGGLVQPGGSLRLSCAASGFAFAAYDMGWVRQAPGKG |
| | | LEWVATISGGGINTYYPDSVKGRFTISRDNSKNTLYLQMNSLRA |
| | | EDTAVYYCARHSGYGSSYGVLFAYWGQGTLVTVSS |
| 121 | CD22 | EVQLLESGGGLVQPGGSLRLSCAASGFTFPVYNMAWVRQAPGKG |
| | | LEWVSEIDALGTDTYYADSVKGRFTISRDNSKNTLYLQMNSLRA |
| | | EDTAVYYCARHSGYGSSYGVLFAYWGQGTLVTVSS |
| 122 | CD22 | DIQMTQSPSSLSASVGDRVTITCRASQSISNNLNWYQQKPGKAP |
| | | KLLIYGKNIRPSGVPSRFSGSGSGTDFTLTISSLQPEDFATYYC |
| | | FQGSQFPYTFGQGTKVEIK |
| 123 | CD22 | DIQMTQSPSSLSASVGDRVTITCRASQDVSSGVAWYQQKPGKAP |
| | | KLLIYHASQSISGVPSRFSGSGSGTDFTLTISSLQPEDFATYYC |
| | | QSYDLKSLNVVFGQGTKVEIK |
| 124 | CD22 | DIQMTQSPSSLSASVGDRVTITCQASQSISSYLAWYQQKPGKAP |
| | | KLLIYGQHNRPSGVPSRFSGSGSGTDFTLTISSLQPEDFATYYC |
| | | QQSYNTPRTFGQGTKVEIK |

### 2. Cell Populations Comprising Genomic Modifications

[0082] In certain embodiments, provided herein are compositions comprising one or more populations of cells having genetic modifications as described in the Cells comprising Genomic modifications section above. In certain embodiments, the composition comprises a single cell population, wherein each of the cells comprises the same set of genomic modifications (1) through (3). In certain embodiments, provided herein are compositions comprising a plurality of cell populations, wherein each cell population comprise a different set of genomic modifications. In general, at least one cell population comprises cells that comprise all of (1) one or more genomic modifications that partially or completely inactivates one or more genes that codes for a subunit of an HLA-1 protein, (2) one or more genomic modifications that partially or completely inactivates one or more genes coding for a subunit of an HLA-2 protein or a transcription factor regulating the expression of one or more subunits of an HLA-2 protein, and (3) one or more genomic modifications that partially or completely inactivates one or more genes that codes for a subunit of a TCR protein, in addition to one or more additional cell populations that do not comprise all three genetic modifications. In certain embodiments, the one or more additional cell populations comprise cells comprising (1) one or more genomic modifications that partially or completely inactivates one or more genes that codes for a subunit of an HLA-1 protein, (2) one or more genomic modifications that partially or completely inactivates one or more genes coding for a subunit of an HLA-2 protein or a transcription factor regulating the expression of one or more subunits of an HLA-2 protein, and/or (3) one or more genomic modifications that partially or completely inactivates one or more genes that codes for a subunit of a TCR protein, but not all of (1)-(3). In a preferred embodiment, the subunit of an HLA-1 protein comprises B2M. In a preferred embodiment, the transcription factor regulating the expression of one or more subunits of an HLA-2 protein comprises CIITA. In certain embodiments, the subunit of a TCR protein is an alpha subunit or a beta subunit. In certain embodiments, the subunit of a TCR protein is a TRAC, TRBC, CD3E, CD3D, CD3G, or CD3Z protein. In a preferred embodiment, the gene that codes for a subunit of a TCR protein is a TRAC gene. In a more preferred embodiment, the at least one cell population comprising cells comprising all three genomic modifications comprises (1) one or more genomic modifications that partially or completely inactivates a B2M gene, (2) one or more genomic modifications that partially or completely inactivates a CIITA gene, and (3) one or more genomic modifications that partially or completely inactivates a TRAC gene. In certain embodiments, the plurality of cell populations comprise at least 1, 2, 3, 4, 5, 6, 7, 8, 9, 10, 11, 12, 13, 14, 15, 16, 17, 18, 19, 20, 25, 30, 35, 40, or 45 and/or no more than 2, 3, 4, 5, 6, 7, 8, 9, 10, 11, 12, 13, 14, 15, 16, 17, 18, 19, 20, 25, 30, 35, 40, 45, or 50 populations.

[0083] In certain embodiments, the first cell population comprises at least 1, 2, 3, 4, 5, 6, 7, 8, 9, 10, 15, 20, 25, 30, 35, 40, 45, 50, 55, 60, 65, or 70% and/or no more than 2, 3, 4, 5, 6, 7, 8, 9, 10, 15, 20, 25, 30, 35, 40, 45, 50, 55, 60, 65, or 75% of all of the cells in the plurality of cell populations, for example 1-75% of all the cells in the plurality of cell populations, preferably 5-75%, more preferably 10-75%, even more preferably 15-75%, yet even more preferably 20-75%. In certain embodiments, the second cell population comprises at least 1, 2, 3, 4, 5, 6, 7, 8, 9, 10, 15, 20, 25, 30, 35, 40, 45, 50, 55, 60, 65, or 70% and/or no more than 2, 3, 4, 5, 6, 7, 8, 9, 10, 15, 20, 25, 30, 35, 40, 45, 50, 55, 60, 65, or 75% of all of the cells in the plurality of cell populations, for example 1-75% of all the cells in the plurality of cell populations, preferably no more than 50%, more preferably no more that 30%, even more preferably no more than 20%, yet even more preferably no more than 10%. In certain embodiments, the third cell population comprises at least 1, 2, 3, 4, 5, 6, 7, 8, 9, 10, 15, 20, 25, 30, 35, 40, 45, 50, 55, 60, 65, or 70% and/or no more than 2, 3, 4, 5, 6, 7, 8, 9, 10, 15, 20, 25, 30, 35, 40, 45, 50, 55, 60, 65, or 75% of all of the cells in the plurality of cell populations, for example 1-75% of all the cells in the plurality of cell populations preferably no more than 50%, more preferably no more that 30%, even more preferably no more than 20%, yet even more preferably no more than 10%. In certain embodiments, the fourth cell population comprises at least 1, 2, 3, 4, 5, 6, 7, 8, 9, 10, 15, 20, 25, 30, 35, 40, 45, 50, 55, 60, 65, or 70% and/or no more than 2, 3, 4, 5, 6, 7, 8, 9, 10, 15, 20, 25, 30, 35, 40, 45, 50, 55, 60, 65, or 75% of all of the cells in the plurality of cell populations, for example 1-75% of all the cells in the plurality of cell populations, preferably no more than 50%, more preferably no more that 30%, even more preferably no more than 20%, yet even more preferably no more than 10%. It is understood that the sum of the percentages for each cell population in the plurality adds to 100%.

[0084] The number, relative abundance, and/or identity of cell populations in a plurality of cell populations can be measured by any suitable method. In certain embodiments, the number, relative abundance, and/or identity of cell populations in a plurality of cell populations can be measured by analyzing one or more nucleic acids in a sample using one or more methods, for example PCR, multiplex PCR, FISH, and/or sequencing. In certain embodiments, the number and/or identity of cell populations in a plurality of cell populations can be measured by analyzing one or more cell surface proteins and/or lack thereof in a sample using one or more methods, for example immunostaining and microscopy, ELISA, pull downs, and/or flow cytometry.

### 3. Guide Nucleic Acids and Nucleic Acid-Guided Nuclease Complexes for Generating Genomic Modifications

[0085] In certain embodiments, provided herein are compositions comprising a guide nucleic acid, a nucleic acid-guided nuclease, a nucleic acid-guided nuclease complex, and/or one or more polynucleotides encoding thereof. In certain embodiments, the nucleic acid-guided nuclease, guide nucleic acid, and/or complex thereof further comprises a donor template. In certain embodiments, the nucleic acid-guided nuclease, guide nucleic acid, and/or complex thereof further comprises an additive that stabilizes the nucleic acid-guided nuclease complex. In certain embodiments, the nucleic acid-guided nuclease and/or guide nucleic acid are combined in the presence of an aqueous buffer. In certain embodiments, the nucleic acid-guided nuclease, guide nucleic acid, and/or complex thereof further comprises further comprise an excipient. In certain embodiments, the nucleic acid-guided nuclease, guide nucleic acid, and/or complex thereof are lyophilized, e.g., freeze-dried, with one or more excipient.

a. Compositions Comprising Guide Nucleic Acids Comprising a Spacer Sequence Directed at a Target Nucleotide Sequence in a Gene Coding for a Subunit of an HLA-1 Protein

[0086] In certain embodiments, provided herein are compositions comprising a first guide nucleic acid comprising a spacer sequence directed at a target nucleotide sequence in a gene coding for a subunit of an HLA-1 protein. In certain embodiments, the guide nucleic acid comprises a targeter nucleic acid and a modulator nucleic acid, wherein the targeter nucleic acid comprises a targeter nucleic acid comprising a targeter stem sequence and a spacer sequence, and the modulator nucleic acid comprises a modulator stem sequence complementary to the targeter stem sequence, and, optionally, a 5′ sequence. The spacer sequence can be any suitable sequence. In certain embodiments, the spacer sequence comprises any one of SEQ ID NOs: 125-2019. In certain embodiments, the guide nucleic acid comprises a single polynucleotide. In preferred embodiments, the guide nucleic acid comprises a dual guide nucleic acid (as described in the Guide nucleic acids section below), wherein the targeter nucleic acid and the modulator nucleic acid are separate polynucleotides. In certain embodiments, the guide nucleic acid comprises one or more chemical modifications to one or more nucleotides and/or internucleotide linkages at or near the 5′ end, the 3′ end, and/or both as described in the gNA modifications section below.

[0087] In certain embodiments, the guide nucleic acid further comprises a nucleic acid-guided nuclease. The guide nucleic acid can be combined and/or complexed with any suitable nucleic acid-guided nuclease. In certain embodiments, the nucleic acid-guided comprises a Type V CRISPR endonuclease, preferably MAD2, MAD7, ART2, ART11, and/or ART11*, more preferably MAD7.

[0088] In certain embodiments, the guide nucleic acid further comprises a nucleic acid-guided nuclease. Any suitable donor template can be combined with the guide nucleic acid. In certain embodiments, the guide nucleic acid comprises a donor template as described in the Donor templates section below. In certain embodiments, the donor template comprises a transgene. In preferred embodiments, the transgene comprises a polynucleotide coding for B2M fusion protein, such as a B2M-HLA-1 subunit fusion protein. In certain embodiments, the HLA-1 subunit comprises HLA-C, HLA-E, or HLA-G, preferably HLA-E or HLA-G. In a preferred embodiment the subunit is HLA-E. In a more preferred embodiment, the subunit is HLA-G. Additionally or alternatively, the cell can comprise a transgene comprising a polynucleotide coding for a CAR or portion thereof. In certain embodiments, the transgene comprises a polynucleotide coding for a dual CAR or portions thereof, e.g., a CAR or portion thereof fusion protein. In certain embodiments, the dual CAR comprises a first CAR or portion thereof and a second CAR or portion thereof, wherein the second CAR or portion thereof is different from the first CAR or portion thereof. In certain embodiments, the CAR or portion thereof comprises a polypeptide that binds at least one of B7H3, BCMA, GPRC5D, CD8, CD8a, CD19, CD20, CD22, CD28, 4-1BB, or CD3zeta. In a preferred embodiment, the CAR or portion thereof comprises a polypeptide at least 60, at least 70, at least 80, at least 90, at least 95, at least 99%, or 100% identical to any one of the amino acid sequences of SEQ ID NOs: 86-124. In a more preferred embodiment, the CAR or portion thereof comprises a polypeptide that binds at least one of B7H3, BCMxA, GPRC5D, CD8, CD8a, CD20, CD22, CD28, 4-1BB, or CD3zeta. In an even more preferred embodiment, the CAR or portion thereof comprises a polypeptide at least 60, at least 70, at least 80, at least 90, at least 95, at least 99%, or 100% identical to any one of the amino acid sequences of SEQ ID NOs: 86-104 or 116-124.

[0089] donor template can further comprise a cell. The cell can be any suitable cell. In certain embodiments, the cell is a human cell, such as human stem cell or human immune cell, such as an immune cell comprising a neutrophil, cosinophil, basophil, mast cell, monocyte, macrophage, dendritic cell, natural killer cell, or a lymphocyte. In a preferred embodiment, the human immune cell is a T cell. In certain embodiments, the T cell comprises a chimeric antigen receptor (CAR) T cell. In certain embodiments, the CAR T cell expresses a plurality of different CARs, e.g., two different CARs (dual CAR T cell). In certain embodiments, the human cell is a human stem cell comprising a human pluripotent stem cell, multipotent stem cell, embryonic stem cell, induced pluripotent stem cell, hematopoietic stem cell, or a CD34+ cell. In a preferred embodiment, the cell is a hematopoietic stem cell. In a more preferred embodiment, the cell is a CD34+ stem cell. In an even more preferred embodiment, the cell is an induced pluripotent stem cell (iPSC).

b. Compositions Comprising Guide Nucleic Acids Comprising a Spacer Sequence Directed at a Target Nucleotide Sequence in a Gene Coding for a Subunit of an HLA-1 Protein and/or a Gene Coding for a Subunit of an HLA-2 Protein or a Transcription Factor Regulating the Expression of One or More Subunits of an HLA-2 Protein

[0090] In certain embodiments, provided herein are compositions comprising a first guide nucleic acid comprising a spacer sequence directed at a target nucleotide sequence in a gene coding for a subunit of an HLA-1 protein, as described above, and a second guide nucleic acid comprising a spacer sequence directed at a target nucleotide sequence in a gene coding for a subunit of an HLA-2 protein or a transcription factor regulating the expression of one or more subunits of an HLA-2 protein. In certain embodiments, the guide nucleic acid comprises a targeter nucleic acid and a modulator nucleic acid, wherein the targeter nucleic acid comprises a targeter nucleic acid comprising a targeter stem sequence and a spacer sequence, and the modulator nucleic acid comprises a modulator stem sequence complementary to the targeter stem sequence, and, optionally, a 5′ sequence. The spacer sequence can be any suitable sequence. In certain embodiments, the spacer sequence comprises any one of SEQ ID NOs: 125-2019. In certain embodiments, the guide nucleic acid comprises a single polynucleotide. In preferred embodiments, the guide nucleic acid comprises a dual guide nucleic acid (as described in the Guide nucleic acids section below), wherein the targeter nucleic acid and the modulator nucleic acid are separate polynucleotides. In certain embodiments, the guide nucleic acid comprises one or more chemical modifications to one or more nucleotides and/or internucleotide linkages at or near the 5′ end, the 3′ end, and/or both as described in the gNA modifications section below.

[0091] In certain embodiments, the guide nucleic acid further comprises a nucleic acid-guided nuclease. The guide nucleic acid can be combined and/or complexed with any suitable nucleic acid-guided nuclease. In certain embodiments, the nucleic acid-guided comprises a Type V CRISPR endonuclease, preferably MAD2, MAD7, ART2, ART11, and/or ART11*, more preferably MAD7.

[0092] In certain embodiments, the guide nucleic acid further comprises a nucleic acid-guided nuclease. Any suitable donor template can be combined with the guide nucleic acid. In certain embodiments, the guide nucleic acid comprises a donor template as described in the Donor templates section below. In certain embodiments, the donor template comprises a transgene. In preferred embodiments, the transgene comprises a polynucleotide coding for B2M fusion protein, such as a B2M-HLA-1 subunit fusion protein. In certain embodiments, the HLA-1 subunit comprises HLA-C, HLA-E, or HLA-G, preferably HLA-E or HLA-G. In a preferred embodiment the subunit is HLA-E. In a more preferred embodiment, the subunit is HLA-G. Additionally or alternatively, the cell can comprise a transgene comprising a polynucleotide coding for a CAR or portion thereof. In certain embodiments, the transgene comprises a polynucleotide coding for a dual CAR or portions thereof, e.g., a CAR or portion thereof fusion protein. In certain embodiments, the dual CAR comprises a first CAR or portion thereof and a second CAR or portion thereof, wherein the second CAR or portion thereof is different from the first CAR or portion thereof. In certain embodiments, the CAR or portion thereof comprises a polypeptide that binds at least one of B7H3, BCMA, GPRC5D, CD8, CD8a, CD19, CD20, CD22, CD28, 4-1BB, or CD3zeta. In a preferred embodiment, the CAR or portion thereof comprises a polypeptide at least 60, at least 70, at least 80, at least 90, at least 95, at least 99%, or 100% identical to any one of the amino acid sequences of SEQ ID NOs: 86-124. In a more preferred embodiment, the CAR or portion thereof comprises a polypeptide that binds at least one of B7H3, BCMxA, GPRC5D, CD8, CD8a, CD20, CD22, CD28, 4-1BB, or CD3zeta. In an even more preferred embodiment, the CAR or portion thereof comprises a polypeptide at least 60, at least 70, at least 80, at least 90, at least 95, at least 99%, or 100% identical to any one of the amino acid sequences of SEQ ID NOs: 86-104 or 116-124.

[0093] In certain embodiments, the guide nucleic acid, nucleic acid-guided nuclease, and/or donor template can further comprise a cell. The cell can be any suitable cell. In certain embodiments, the cell is a human cell, such as human stem cell or human immune cell, such as an immune cell comprising a neutrophil, cosinophil, basophil, mast cell, monocyte, macrophage, dendritic cell, natural killer cell, or a lymphocyte. In a preferred embodiment, the human immune cell is a T cell. In certain embodiments, the T cell comprises a chimeric antigen receptor (CAR) T cell. In certain embodiments, the CAR T cell expresses a plurality of different CARs, e.g., two different CARs (dual CAR T cell). In certain embodiments, the human cell is a human stem cell comprising a human pluripotent stem cell, multipotent stem cell, embryonic stem cell, induced pluripotent stem cell, hematopoietic stem cell, or a CD34+ cell. In a preferred embodiment, the cell is a hematopoietic stem cell. In a more preferred embodiment, the cell is a CD34+ stem cell. In an even more preferred embodiment, the cell is an induced pluripotent stem cell (iPSC).

c. Compositions Comprising Guide Nucleic Acids Comprising a Spacer Sequence Directed at a Target Nucleotide Sequence in a Gene Coding for a Subunit of an HLA-1 Protein, a Gene Coding for a Subunit of an HLA-2 Protein or a Transcription Factor Regulating the Expression of One or More Subunits of an HLA-2 Protein, and/or a Gene Coding for a Subunit of an TCR Protein

[0094] In certain embodiments, provided herein are compositions comprising a first guide nucleic acid comprising a spacer sequence directed at a target nucleotide sequence in a gene coding for a subunit of an HLA-1 protein, a second guide nucleic acid comprising a spacer sequence directed at a target nucleotide sequence in a gene coding for a subunit of an HLA-2 protein or a transcription factor regulating the expression of one or more subunits of an HLA-2 protein, as described above, and a third guide nucleic acid directed at a target nucleotide sequence in a gene coding for a subunit of a TCR protein. In certain embodiments, the guide nucleic acid comprises a targeter nucleic acid and a modulator nucleic acid, wherein the targeter nucleic acid comprises a targeter nucleic acid comprising a targeter stem sequence and a spacer sequence, and the modulator nucleic acid comprises a modulator stem sequence complementary to the targeter stem sequence, and, optionally, a 5′ sequence. The spacer sequence can be any suitable sequence. In certain embodiments, the spacer sequence comprises any one of SEQ ID NOs: 125-2019. In certain embodiments, the guide nucleic acid comprises a single polynucleotide. In preferred embodiments, the guide nucleic acid comprises a dual guide nucleic acid (as described in the Guide nucleic acids section below), wherein the targeter nucleic acid and the modulator nucleic acid are separate polynucleotides. In certain embodiments, the guide nucleic acid comprises one or more chemical modifications to one or more nucleotides and/or internucleotide linkages at or near the 5′ end, the 3′ end, and/or both as described in the gNA modifications section below.

[0095] In certain embodiments, the guide nucleic acid further comprises a nucleic acid-guided nuclease. The guide nucleic acid can be combined and/or complexed with any suitable nucleic acid-guided nuclease. In certain embodiments, the nucleic acid-guided comprises a Type V CRISPR endonuclease, preferably MAD2, MAD7, ART2, ART11, and/or ART11*, more preferably MAD7.

[0096] In certain embodiments, the guide nucleic acid further comprises a nucleic acid-guided nuclease. Any suitable donor template can be combined with the guide nucleic acid. In certain embodiments, the guide nucleic acid comprises a donor template as described in the Donor templates section below. In certain embodiments, the donor template comprises a transgene. In preferred embodiments, the transgene comprises a polynucleotide coding for B2M fusion protein, such as a B2M-HLA-1 subunit fusion protein. In certain embodiments, the HLA-1 subunit comprises HLA-C, HLA-E, or HLA-G, preferably HLA-E or HLA-G. In a preferred embodiment the subunit is HLA-E. In a more preferred embodiment, the subunit is HLA-G. Additionally or alternatively, the cell can comprise a transgene comprising a polynucleotide coding for a CAR or portion thereof. In certain embodiments, the transgene comprises a polynucleotide coding for a dual CAR or portions thereof, e.g., a CAR or portion thereof fusion protein. In certain embodiments, the dual CAR comprises a first CAR or portion thereof and a second CAR or portion thereof, wherein the second CAR or portion thereof is different from the first CAR or portion thereof. In certain embodiments, the CAR or portion thereof comprises a polypeptide that binds at least one of B7H3, BCMA, GPRC5D, CD8, CD8a, CD19, CD20, CD22, CD28, 4-1BB, or CD3zeta. In a preferred embodiment, the CAR or portion thereof comprises a polypeptide at least 60, at least 70, at least 80, at least 90, at least 95, at least 99%, or 100% identical to any one of the amino acid sequences of SEQ ID NOs: 86-124. In a more preferred embodiment, the CAR or portion thereof comprises a polypeptide that binds at least one of B7H3, BCMxA, GPRC5D, CD8, CD8a, CD20, CD22, CD28, 4-1BB, or CD3zeta. In an even more preferred embodiment, the CAR or portion thereof comprises a polypeptide at least 60, at least 70, at least 80, at least 90, at least 95, at least 99%, or 100% identical to any one of the amino acid sequences of SEQ ID NOs: 86-104 or 116-124.

[0097] In certain embodiments, the guide nucleic acid, nucleic acid-guided nuclease, and/or donor template can further comprise a cell. The cell can be any suitable cell. In certain embodiments, the cell is a human cell, such as human stem cell or human immune cell, such as an immune cell comprising a neutrophil, cosinophil, basophil, mast cell, monocyte, macrophage, dendritic cell, natural killer cell, or a lymphocyte. In a preferred embodiment, the human immune cell is a T cell. In certain embodiments, the T cell comprises a chimeric antigen receptor (CAR) T cell. In certain embodiments, the CAR T cell expresses a plurality of different CARs, e.g., two different CARs (dual CAR T cell). In certain embodiments, the human cell is a human stem cell comprising a human pluripotent stem cell, multipotent stem cell, embryonic stem cell, induced pluripotent stem cell, hematopoietic stem cell, or a CD34+ cell. In a preferred embodiment, the cell is a hematopoietic stem cell. In a more preferred embodiment, the cell is a CD34+ stem cell. In an even more preferred embodiment, the cell is an induced pluripotent stem cell (iPSC).

d. Compositions Comprising Guide Nucleic Acids Comprising a Spacer Sequence Directed at a Target Nucleotide Sequence in a Gene Coding for a Subunit of an HLA-1 Protein and/or a Gene Coding for a Subunit of an TCR Protein

[0098] In certain embodiments, provided herein are compositions comprising a first guide nucleic acid comprising a spacer sequence directed at a target nucleotide sequence in a gene coding for a subunit of an HLA-1 protein, as described above, and a second guide nucleic acid comprising a spacer sequence directed at a target nucleotide sequence in a gene coding for a subunit of a TCR protein. In certain embodiments, the guide nucleic acid comprises a targeter nucleic acid and a modulator nucleic acid, wherein the targeter nucleic acid comprises a targeter nucleic acid comprising a targeter stem sequence and a spacer sequence, and the modulator nucleic acid comprises a modulator stem sequence complementary to the targeter stem sequence, and, optionally, a 5′ sequence. The spacer sequence can be any suitable sequence. In certain embodiments, the spacer sequence comprises any one of SEQ ID NOs: 125-2019. In certain embodiments, the guide nucleic acid comprises a single polynucleotide. In preferred embodiments, the guide nucleic acid comprises a dual guide nucleic acid (as described in the Guide nucleic acids section below), wherein the targeter nucleic acid and the modulator nucleic acid are separate polynucleotides. In certain embodiments, the guide nucleic acid comprises one or more chemical modifications to one or more nucleotides and/or internucleotide linkages at or near the 5′ end, the 3′ end, and/or both as described in the gNA modifications section below.

[0099] In certain embodiments, the guide nucleic acid further comprises a nucleic acid-guided nuclease. The guide nucleic acid can be combined and/or complexed with any suitable nucleic acid-guided nuclease. In certain embodiments, the nucleic acid-guided comprises a Type V CRISPR endonuclease, preferably MAD2, MAD7, ART2, ART11, and/or ART11*, more preferably MAD7.

[0100] In certain embodiments, the guide nucleic acid further comprises a nucleic acid-guided nuclease. Any suitable donor template can be combined with the guide nucleic acid. In certain embodiments, the guide nucleic acid comprises a donor template as described in the Donor templates section below. In certain embodiments, the donor template comprises a transgene. In preferred embodiments, the transgene comprises a polynucleotide coding for B2M fusion protein, such as a B2M-HLA-1 subunit fusion protein. In certain embodiments, the HLA-1 subunit comprises HLA-C, HLA-E, or HLA-G, preferably HLA-E or HLA-G. In a preferred embodiment the subunit is HLA-E. In a more preferred embodiment, the subunit is HLA-G. Additionally or alternatively, the cell can comprise a transgene comprising a polynucleotide coding for a CAR or portion thereof. In certain embodiments, the transgene comprises a polynucleotide coding for a dual CAR or portions thereof, e.g., a CAR or portion thereof fusion protein. In certain embodiments, the dual CAR comprises a first CAR or portion thereof and a second CAR or portion thereof, wherein the second CAR or portion thereof is different from the first CAR or portion thereof. In certain embodiments, the CAR or portion thereof comprises a polypeptide that binds at least one of B7H3, BCMA, GPRC5D, CD8, CD8a, CD19, CD20, CD22, CD28, 4-1BB, or CD3zeta. In a preferred embodiment, the CAR or portion thereof comprises a polypeptide at least 60, at least 70, at least 80, at least 90, at least 95, at least 99%, or 100% identical to any one of the amino acid sequences of SEQ ID NOs: 86-124. In a more preferred embodiment, the CAR or portion thereof comprises a polypeptide that binds at least one of B7H3, BCMxA, GPRC5D, CD8, CD8a, CD20, CD22, CD28, 4-1BB, or CD3zeta. In an even more preferred embodiment, the CAR or portion thereof comprises a polypeptide at least 60, at least 70, at least 80, at least 90, at least 95, at least 99%, or 100% identical to any one of the amino acid sequences of SEQ ID NOs: 86-104 or 116-124.

[0101] In certain embodiments, the guide nucleic acid, nucleic acid-guided nuclease, and/or donor template can further comprise a cell. The cell can be any suitable cell. In certain embodiments, the cell is a human cell, such as human stem cell or human immune cell, such as an immune cell comprising a neutrophil, cosinophil, basophil, mast cell, monocyte, macrophage, dendritic cell, natural killer cell, or a lymphocyte. In a preferred embodiment, the human immune cell is a T cell. In certain embodiments, the T cell comprises a chimeric antigen receptor (CAR) T cell. In certain embodiments, the CAR T cell expresses a plurality of different CARs, e.g., two different CARs (dual CAR T cell). In certain embodiments, the human cell is a human stem cell comprising a human pluripotent stem cell, multipotent stem cell, embryonic stem cell, induced pluripotent stem cell, hematopoietic stem cell, or a CD34+ cell. In a preferred embodiment, the cell is a hematopoietic stem cell. In a more preferred embodiment, the cell is a CD34+ stem cell. In an even more preferred embodiment, the cell is an induced pluripotent stem cell (iPSC).

e. Compositions Comprising Guide Nucleic Acids Comprising a Spacer Sequence Directed at a Target Nucleotide Sequence in a Gene Coding for a Subunit of an HLA-2 Protein or a Transcription Factor Regulating the Expression of One or More Subunits of an HLA-2 Protein

[0102] In certain embodiments, provided herein are compositions comprising a first guide nucleic acid comprising a spacer sequence directed at a target nucleotide sequence in a gene coding for a subunit of an HLA-2 protein or a transcription factor regulating the expression of one or more subunits of an HLA-2 protein. In certain embodiments, the guide nucleic acid comprises a targeter nucleic acid and a modulator nucleic acid, wherein the targeter nucleic acid comprises a targeter nucleic acid comprising a targeter stem sequence and a spacer sequence, and the modulator nucleic acid comprises a modulator stem sequence complementary to the targeter stem sequence, and, optionally, a 5′ sequence. The spacer sequence can be any suitable sequence. In certain embodiments, the spacer sequence comprises any one of SEQ ID NOs: 125-2019. In certain embodiments, the guide nucleic acid comprises a single polynucleotide. In preferred embodiments, the guide nucleic acid comprises a dual guide nucleic acid (as described in the Guide nucleic acids section below), wherein the targeter nucleic acid and the modulator nucleic acid are separate polynucleotides. In certain embodiments, the guide nucleic acid comprises one or more chemical modifications to one or more nucleotides and/or internucleotide linkages at or near the 5′ end, the 3′ end, and/or both as described in the gNA modifications section below.

[0103] In certain embodiments, the guide nucleic acid further comprises a nucleic acid-guided nuclease. The guide nucleic acid can be combined and/or complexed with any suitable nucleic acid-guided nuclease. In certain embodiments, the nucleic acid-guided comprises a Type V CRISPR endonuclease, preferably MAD2, MAD7, ART2, ART11, and/or ART11*, more preferably MAD7.

[0104] In certain embodiments, the guide nucleic acid further comprises a nucleic acid-guided nuclease. Any suitable donor template can be combined with the guide nucleic acid. In certain embodiments, the guide nucleic acid comprises a donor template as described in the Donor templates section below. In certain embodiments, the donor template comprises a transgene. In preferred embodiments, the transgene comprises a polynucleotide coding for B2M fusion protein, such as a B2M-HLA-1 subunit fusion protein. In certain embodiments, the HLA-1 subunit comprises HLA-C, HLA-E, or HLA-G, preferably HLA-E or HLA-G. In a preferred embodiment the subunit is HLA-E. In a more preferred embodiment, the subunit is HLA-G. Additionally or alternatively, the cell can comprise a transgene comprising a polynucleotide coding for a CAR or portion thereof. In certain embodiments, the transgene comprises a polynucleotide coding for a dual CAR or portions thereof, e.g., a CAR or portion thereof fusion protein. In certain embodiments, the dual CAR comprises a first CAR or portion thereof and a second CAR or portion thereof, wherein the second CAR or portion thereof is different from the first CAR or portion thereof. In certain embodiments, the CAR or portion thereof comprises a polypeptide that binds at least one of B7H3, BCMA, GPRC5D, CD8, CD8a, CD19, CD20, CD22, CD28, 4-1BB, or CD3zeta. In a preferred embodiment, the CAR or portion thereof comprises a polypeptide at least 60, at least 70, at least 80, at least 90, at least 95, at least 99%, or 100% identical to any one of the amino acid sequences of SEQ ID NOs: 86-124. In a more preferred embodiment, the CAR or portion thereof comprises a polypeptide that binds at least one of B7H3, BCMxA, GPRC5D, CD8, CD8a, CD20, CD22, CD28, 4-1BB, or CD3zeta. In an even more preferred embodiment, the CAR or portion thereof comprises a polypeptide at least 60, at least 70, at least 80, at least 90, at least 95, at least 99%, or 100% identical to any one of the amino acid sequences of SEQ ID NOs: 86-104 or 116-124.

[0105] In certain embodiments, the guide nucleic acid, nucleic acid-guided nuclease, and/or donor template can further comprise a cell. The cell can be any suitable cell. In certain embodiments, the cell is a human cell, such as human stem cell or human immune cell, such as an immune cell comprising a neutrophil, cosinophil, basophil, mast cell, monocyte, macrophage, dendritic cell, natural killer cell, or a lymphocyte. In a preferred embodiment, the human immune cell is a T cell. In certain embodiments, the T cell comprises a chimeric antigen receptor (CAR) T cell. In certain embodiments, the CAR T cell expresses a plurality of different CARS, e.g., two different CARs (dual CAR T cell). In certain embodiments, the human cell is a human stem cell comprising a human pluripotent stem cell, multipotent stem cell, embryonic stem cell, induced pluripotent stem cell, hematopoietic stem cell, or a CD34+ cell. In a preferred embodiment, the cell is a hematopoietic stem cell. In a more preferred embodiment, the cell is a CD34+ stem cell. In an even more preferred embodiment, the cell is an induced pluripotent stem cell (iPSC).

f. Compositions Comprising Guide Nucleic Acids Comprising a Spacer Sequence Directed at a Target Nucleotide Sequence in a Gene Coding for a Subunit of an HLA-2 Protein or a Transcription Factor Regulating the Expression of One or More Subunits of an HLA-2 Protein and/or Gene Coding for a Subunit of a TCR Protein

[0106] In certain embodiments, provided herein are compositions comprising a first guide nucleic acid comprising a spacer sequence directed at a target nucleotide sequence in a gene coding for a subunit of an HLA-2 protein or a transcription factor regulating the expression of one or more subunits of an HLA-2 protein and a second guide nucleic acid comprising a spacer sequence directed at a target nucleotide sequence in a gene coding for a subunit of a TCR protein. In certain embodiments, the guide nucleic acid comprises a targeter nucleic acid and a modulator nucleic acid, wherein the targeter nucleic acid comprises a targeter nucleic acid comprising a targeter stem sequence and a spacer sequence, and the modulator nucleic acid comprises a modulator stem sequence complementary to the targeter stem sequence, and, optionally, a 5′ sequence. The spacer sequence can be any suitable sequence. In certain embodiments, the spacer sequence comprises any one of SEQ ID NOs: 125-2019. In certain embodiments, the guide nucleic acid comprises a single polynucleotide. In preferred embodiments, the guide nucleic acid comprises a dual guide nucleic acid (as described in the Guide nucleic acids section below), wherein the targeter nucleic acid and the modulator nucleic acid are separate polynucleotides. In certain embodiments, the guide nucleic acid comprises one or more chemical modifications to one or more nucleotides and/or internucleotide linkages at or near the 5′ end, the 3′ end, and/or both as described in the gNA modifications section below.

[0107] In certain embodiments, the guide nucleic acid further comprises a nucleic acid-guided nuclease. The guide nucleic acid can be combined and/or complexed with any suitable nucleic acid-guided nuclease. In certain embodiments, the nucleic acid-guided comprises a Type V CRISPR endonuclease, preferably MAD2, MAD7, ART2, ART11, and/or ART11*, more preferably MAD7.

[0108] In certain embodiments, the guide nucleic acid further comprises a nucleic acid-guided nuclease. Any suitable donor template can be combined with the guide nucleic acid. In certain embodiments, the guide nucleic acid comprises a donor template as described in the Donor templates section below. In certain embodiments, the donor template comprises a transgene. In preferred embodiments, the transgene comprises a polynucleotide coding for B2M fusion protein, such as a B2M-HLA-1 subunit fusion protein. In certain embodiments, the HLA-1 subunit comprises HLA-C, HLA-E, or HLA-G, preferably HLA-E or HLA-G. In a preferred embodiment the subunit is HLA-E. In a more preferred embodiment, the subunit is HLA-G. Additionally or alternatively, the cell can comprise a transgene comprising a polynucleotide coding for a CAR or portion thereof. In certain embodiments, the transgene comprises a polynucleotide coding for a dual CAR or portions thereof, e.g., a CAR or portion thereof fusion protein. In certain embodiments, the dual CAR comprises a first CAR or portion thereof and a second CAR or portion thereof, wherein the second CAR or portion thereof is different from the first CAR or portion thereof. In certain embodiments, the CAR or portion thereof comprises a polypeptide that binds at least one of B7H3, BCMA, GPRC5D, CD8, CD8a, CD19, CD20, CD22, CD28, 4-1BB, or CD3zeta. In a preferred embodiment, the CAR or portion thereof comprises a polypeptide at least 60, at least 70, at least 80, at least 90, at least 95, at least 99%, or 100% identical to any one of the amino acid sequences of SEQ ID NOs: 86-124. In a more preferred embodiment, the CAR or portion thereof comprises a polypeptide that binds at least one of B7H3, BCMxA, GPRC5D, CD8, CD8a, CD20, CD22, CD28, 4-1BB, or CD3zeta. In an even more preferred embodiment, the CAR or portion thereof comprises a polypeptide at least 60, at least 70, at least 80, at least 90, at least 95, at least 99%, or 100% identical to any one of the amino acid sequences of SEQ ID NOs: 86-104 or 116-124.

[0109] In certain embodiments, the guide nucleic acid, nucleic acid-guided nuclease, and/or donor template can further comprise a cell. The cell can be any suitable cell. In certain embodiments, the cell is a human cell, such as human stem cell or human immune cell, such as an immune cell comprising a neutrophil, cosinophil, basophil, mast cell, monocyte, macrophage, dendritic cell, natural killer cell, or a lymphocyte. In a preferred embodiment, the human immune cell is a T cell. In certain embodiments, the T cell comprises a chimeric antigen receptor (CAR) T cell. In certain embodiments, the CAR T cell expresses a plurality of different CARS, e.g., two different CARs (dual CAR T cell). In certain embodiments, the human cell is a human stem cell comprising a human pluripotent stem cell, multipotent stem cell, embryonic stem cell, induced pluripotent stem cell, hematopoietic stem cell, or a CD34+ cell. In a preferred embodiment, the cell is a hematopoietic stem cell. In a more preferred embodiment, the cell is a CD34+ stem cell. In an even more preferred embodiment, the cell is an induced pluripotent stem cell (iPSC).

g. Compositions Comprising Guide Nucleic Acids Comprising a Spacer Sequence Directed at a Target Nucleotide Sequence in a Gene Coding for a Subunit of a TCR Protein

[0110] In certain embodiments, provided herein are compositions comprising a first guide nucleic acid comprising a spacer sequence directed at a target nucleotide sequence in a gene coding for a subunit of a TCR protein. In certain embodiments, the guide nucleic acid comprises a targeter nucleic acid and a modulator nucleic acid, wherein the targeter nucleic acid comprises a targeter nucleic acid comprising a targeter stem sequence and a spacer sequence, and the modulator nucleic acid comprises a modulator stem sequence complementary to the targeter stem sequence, and, optionally, a 5′ sequence. The spacer sequence can be any suitable sequence. In certain embodiments, the spacer sequence comprises any one of SEQ ID NOs: 125-2019. In certain embodiments, the guide nucleic acid comprises a single polynucleotide. In preferred embodiments, the guide nucleic acid comprises a dual guide nucleic acid (as described in the Guide nucleic acids section below), wherein the targeter nucleic acid and the modulator nucleic acid are separate polynucleotides. In certain embodiments, the guide nucleic acid comprises one or more chemical modifications to one or more nucleotides and/or internucleotide linkages at or near the 5′ end, the 3′ end, and/or both as described in the gNA modifications section below.

[0111] In certain embodiments, the guide nucleic acid further comprises a nucleic acid-guided nuclease. The guide nucleic acid can be combined and/or complexed with any suitable nucleic acid-guided nuclease. In certain embodiments, the nucleic acid-guided comprises a Type V CRISPR endonuclease, preferably MAD2, MAD7, ART2, ART11, and/or ART11*, more preferably MAD7.

[0112] In certain embodiments, the guide nucleic acid further comprises a nucleic acid-guided nuclease. Any suitable donor template can be combined with the guide nucleic acid. In certain embodiments, the guide nucleic acid comprises a donor template as described in the Donor templates section below. In certain embodiments, the donor template comprises a transgene. In preferred embodiments, the transgene comprises a polynucleotide coding for B2M fusion protein, such as a B2M-HLA-1 subunit fusion protein. In certain embodiments, the HLA-1 subunit comprises HLA-C, HLA-E, or HLA-G, preferably HLA-E or HLA-G. In a preferred embodiment the subunit is HLA-E. In a more preferred embodiment, the subunit is HLA-G. Additionally or alternatively, the cell can comprise a transgene comprising a polynucleotide coding for a CAR or portion thereof. In certain embodiments, the transgene comprises a polynucleotide coding for a dual CAR or portions thereof, e.g., a CAR or portion thereof fusion protein. In certain embodiments, the dual CAR comprises a first CAR or portion thereof and a second CAR or portion thereof, wherein the second CAR or portion thereof is different from the first CAR or portion thereof. In certain embodiments, the CAR or portion thereof comprises a polypeptide that binds at least one of B7H3, BCMA, GPRC5D, CD8, CD8a, CD19, CD20, CD22, CD28, 4-1BB, or CD3zeta. In a preferred embodiment, the CAR or portion thereof comprises a polypeptide at least 60, at least 70, at least 80, at least 90, at least 95, at least 99%, or 100% identical to any one of the amino acid sequences of SEQ ID NOs: 86-124. In a more preferred embodiment, the CAR or portion thereof comprises a polypeptide that binds at least one of B7H3, BCMxA, GPRC5D, CD8, CD8a, CD20, CD22, CD28, 4-1BB, or CD3zeta. In an even more preferred embodiment, the CAR or portion thereof comprises a polypeptide at least 60, at least 70, at least 80, at least 90, at least 95, at least 99%, or 100% identical to any one of the amino acid sequences of SEQ ID NOs: 86-104 or 116-124.

[0113] donor template can further comprise a cell. The cell can be any suitable cell. In certain embodiments, the cell is a human cell, such as human stem cell or human immune cell, such as an immune cell comprising a neutrophil, eosinophil, basophil, mast cell, monocyte, macrophage, dendritic cell, natural killer cell, or a lymphocyte. In a preferred embodiment, the human immune cell is a T cell. In certain embodiments, the T cell comprises a chimeric antigen receptor (CAR) T cell. In certain embodiments, the CAR T cell expresses a plurality of different CARS, e.g., two different CARs (dual CAR T cell). In certain embodiments, the human cell is a human stem cell comprising a human pluripotent stem cell, multipotent stem cell, embryonic stem cell, induced pluripotent stem cell, hematopoietic stem cell, or a CD34+ cell. In a preferred embodiment, the cell is a hematopoietic stem cell. In a more preferred embodiment, the cell is a CD34+ stem cell. In an even more preferred embodiment, the cell is an induced pluripotent stem cell (iPSC).

TABLE 2
Spacer sequences

| SEQ ID NO | Name | Sequence |
|---|---|---|
| 125 | Tap1_001 | GATTTCGCTTTCCCCTAAATG |
| 126 | Tap1_002 | GCTTTCCCCTAAATGGCTGAG |
| 127 | Tap1_003 | CCCTAAATGGCTGAGCTTCTC |
| 128 | Tap1_004 | CGAGAGCCCCGCCCTCGTTCC |
| 129 | Tap1_005 | GCTCTTGGAGCCAACCGTTGC |
| 130 | Tap1_006 | AAGCCATTAGCTGCGGCACTG |
| 131 | Tap1_007 | TGCCACAGGGCTGCTGCGGGC |
| 132 | Tap1_008 | CAGAGCCGCCCTGACCGCCGG |
| 133 | Tap1_009 | TCCAGGGGAGATGGCCATTCC |
| 134 | Tap1_010 | CGGGCCGCCTCACTGACTGGA |
| 135 | Tap1_011 | GAGTGAAGGTATCGGCTGAGC |
| 136 | Tap1_012 | AGCCCCCAGACCTGGCTATGG |
| 137 | Tap1_013 | CGGGTTCTTTATAGTGCAGTG |
| 138 | Tap1_014 | TAGTGCAGTGCTGGAGTTCGT |
| 139 | Tap1_015 | GGGCTGTCCTGCGCCAGGAGA |
| 140 | Tap1_016 | AGGAGAAACCTGTCTGGTTCT |
| 141 | Tap1_017 | CAACAGAACCAGACAGGTTTC |
| 142 | Tap1_018 | TGTGGTACCTGGTGCGAGGCC |
| 143 | Tap1_019 | CCACCTTCTTGGGCAGAAGGA |
| 144 | Tap1_020 | CTTCTGCCCAAGAAGGTGGGA |
| 145 | Tap1_021 | CCAGAGATTCCCGCACCTGCA |
| 146 | Tap1_022 | CCTAAACTTCTGGGCTTCGCC |
| 147 | Tap1_023 | CCAACGAGGAGGGCGAAGCCC |
| 148 | Tap1_024 | TTGCAGCTTTTCCCTAAACTT |
| 149 | Tap1_025 | TTTCTTGCAGCTTTTCCCTAA |
| 150 | Tap1_026 | GGGAAAAGCTGCAAGAAATAA |
| 151 | Tap1_027 | AGCAGCATACCTGAAATCTAT |
| 152 | Tap1_028 | TGGTCTCTTTATAGATTTCAG |
| 153 | Tap1_029 | TAGATTTCAGGTATGCTGCTG |
| 154 | Tap1_030 | AGGTATGCTGCTGAAAGTGGG |
| 155 | Tap1_031 | TTCTCTACCAGATGCAGTTCA |
| 156 | Tap1_032 | ACTATTCTTACCTCCCTCTAG |
| 157 | Tap1_033 | TCTGAGGAGCCCACAGCCTTC |
| 158 | Tap1_034 | AGTACCTGGACCGCACCCCTC |
| 159 | Tap1_035 | GGTAGGCAAAGGAGACATCTT |
| 160 | Tap1_036 | CCTACCCAAACCGCCCAGATG |
| 161 | Tap1_037 | ATCTCAGGTGGCTGCAGTGGG |
| 162 | Tap1_038 | TTGAAGACTTCTTCCAAATAC |
| 163 | Tap1_039 | GAAGAAGTCTTCAAGAAAATA |
| 164 | Tap1_040 | CTCCATAGTTGGCTTCTGGGT |
| 165 | Tap1_041 | CTGCAGCAGCTGTGATTTCCT |
| 166 | Tap1_042 | ATCTCTGGACTCCCTCAGGGC |
| 167 | Tap1_043 | CTCTGCAGAGGTAGACGAGGC |
| 168 | Tap1_044 | CGGATCAATGCTCGGGCCAAC |
| 169 | Tap1_045 | CATCCAGGGCACTGGTGGCAT |
| 170 | Tap1_046 | GTACAGGAGCTGCTCCACCTG |
| 171 | Tap1_047 | CTCAGGTGGAGCAGCTCCTGT |
| 172 | Tap1_048 | TGGAAGGAGGCGCTATCCGGG |
| 173 | Tap1_049 | TCCATGAGCTGCTGGTGGGTT |
| 174 | Tap1_050 | ATTCTGGAGCATCTGCAGGAG |
| 175 | TAP2_001 | TCATCTCGTATCCGTTGACAG |
| 176 | TAP2_002 | CTGTGGCTGCTTCAGGGCCCT |
| 177 | TAP2_003 | CTTCCTCAAGGGCTGCCAGGA |
| 178 | TAP2_004 | GCAGCCCCCACAGCCCTCCCA |
| 179 | TAP2_005 | TGGGGACACTGCTGCTCCCGC |
| 180 | TAP2_006 | TTGTTCACCTGGTCCTGCTCC |
| 181 | TAP2_007 | ATGCCTCTTTCAGGTGAGACA |
| 182 | TAP2_008 | AGGTGAGACATTAATCCCTCA |
| 183 | TAP2_009 | ACCCCCATGCCTTTGCCAGTG |
| 184 | TAP2_010 | CCAGTGCCATCTTCTTCATGT |
| 185 | TAP2_011 | TCCTCCCTGCTGCGCCAGGAC |
| 186 | TAP2_012 | TTCCAGGAGACTAAGACAGGT |
| 187 | TAP2_013 | CTCACCTGCTCTGTCCTTCTT |
| 188 | TAP2_014 | AAGGAAGCCAGTTACTCATCA |
| 189 | TAP2_015 | ACCAGGCTTCGCAAGAGCACA |
| 190 | TAP2_016 | AATGCCAATGTGCTCTTGCGA |
| 191 | TAP2_017 | TCTGCTGCACATGCCCTTCAC |
| 192 | TAP2_018 | GGGTTCCCTTACATGCACGCT |
| 193 | TAP2_019 | CTGGCCCTCTTTTCCAGGAAG |
| 194 | TAP2_020 | CAGGAAGTGCTTCGGGAGATC |
| 195 | TAP2_021 | TAGCGACAGACTTCATGCTCC |
| 196 | TAP2_022 | GGGCCGAGGAGCATGAAGTCT |
| 197 | TAP2_023 | ACAACCACTCTGGTATCTTAC |
| 198 | TAP2_024 | TTCTCCTCTTCCAGGTGCTGC |
| 199 | TAP2_025 | CTTTATGATCTACCAGGAGAG |
| 200 | TAP2_026 | TGATCTACCAGGAGAGCGTGG |
| 201 | TAP2_027 | CAGACCCTGGTATACATATAT |
| 202 | TAP2_028 | GCTGTCGGTCCATGTAGGAGA |
| 203 | TAP2_029 | TCCTACATGGACCGACAGCCA |
| 204 | TAP2_030 | ACAACCCCCTGCAGAGTGGTG |
| 205 | TAP2_031 | CATATCCCAATCGCCCTGACA |
| 206 | TAP2_032 | AGGCACCTTGAGCACAGGCCT |
| 207 | TAP2_033 | CTCCCTCTTTCAGGCACCTTG |
| 208 | TAP2_034 | TGGTTTTCTAGGGGCTGACGT |
| 209 | TAP2_035 | TAGGGGCTGACGTTTACCCTA |
| 210 | TAP2_036 | CCCTACGTCCTGGTGAGGTGA |
| 211 | TAP2_037 | ATCCAGCAGCACCTGTCCCCC |
| 212 | TAP2_038 | AGTTGGGCAGGAGCCTGTGCT |
| 213 | TAP2_039 | CTGGATGAAGTCATCTGCGTG |
| 214 | TAP2_040 | TAGAAGATACCTGTGTATATT |
| 215 | TAP2_041 | TCTGATTTCCTCAGATGTAGG |
| 216 | TAP2_042 | CTCAGATGTAGGGGAGAAGGG |
| 217 | TAP2_043 | TGTCCCGCAGCCAGCTGGCTT |
| 218 | TAPBP_001 | CGCTCGCATCCTCCACGAACC |
| 219 | TAPBP_002 | GCAGAGGCGGGGAGAGGCACG |
| 220 | TAPBP_003 | CCTACATGCCCCCCACCTCCG |
| 221 | TAPBP_004 | GGCTAGAGTGGCGACGCCAGC |
| 222 | TAPBP_005 | CTGCTTGGGATGATGATGAGC |
| 223 | TAPBP_006 | CGGTCCATGGGCCCCATGGCT |
| 224 | TAPBP_007 | AGGAGGGCACCTATCTGGCCA |
| 225 | TAPBP_008 | GGGGGTTCTGGGGAAAGAGGA |
| 226 | TAPBP_009 | CCTATGCTCATTTCGTCCTCT |
| 227 | TAPBP_010 | GTCCTCTTTCCCCAGAACCCC |
| 228 | TAPBP_011 | CCCAGAACCCCCCAAAGTGTC |
| 229 | TAPBP_012 | AGGGCCCTCCCTTGAGGACAG |
| 230 | TAPBP_013 | CTGTCTGCCTTTCTTCTGCTT |
| 231 | TAPBP_014 | TTCTGCTTGGGCTCTTCAAGG |
| 232 | TAPBP_015 | AATCCTTGCAGGTGGACAGGT |
| 233 | TAPBP_016 | CCCACAGCTGTCTACCTGTCC |
| 234 | PSMB9_001 | ACGGGGGCGTTGTGATGGGTT |
| 235 | PSMB9_002 | CTCACCCTGCAGACACTCGGG |
| 236 | PSMB9_003 | ACAAGCTGTCCCCGCTGCACG |
| 237 | PSMB9_004 | TTCCTAATATTTCCCTCAGGA |
| 238 | PSMB9_005 | CCTCAGGATAGAACTGGAGGA |
| 239 | PSMB9_006 | CAGCAGCCAAAACAAGTGGAG |
| 240 | PSMB9_007 | TCACCACATTTGCAGCAGCCA |
| 241 | PSMB9_008 | TAGCTGATATTTCTCACCACA |
| 242 | PSMB9_009 | GCTGCTGCAAATGTGGTGAGA |
| 243 | PSMB9_010 | GGAGAAACTCACCTGACCTCC |
| 244 | PSMB9_011 | ACCTGAGGATCCCTTTCCCAG |
| 245 | PSMB9_012 | CCAGGTATATGGAACCCTGGG |
| 246 | PSMB9_013 | CCATTGGTGGCTCCGGCAGCA |
| 247 | PSMB9_014 | TCTATGGTTATGTGGATGCAG |
| 248 | PSMB9_015 | GCAGTTCATTGCCCAAGATGA |
| 249 | PSMB8_001 | TCTATGCGATCTCCAGAGCTC |
| 250 | PSMB8_002 | CCCCGGGGAATGCAGGTCGGG |
| 251 | PSMB8_003 | TCAACCTCTTTTCTCTTATCA |
| 252 | PSMB8_004 | TCTTATCAGCCCACAGAATTC |
| 253 | PSMB8_005 | TCCGTCCCCACCCAGGGACTG |
| 254 | PSMB8_006 | CTCACTCCACCTTGTCCTCAC |
| 255 | PSMB8_007 | GCAGATAGTACAGCCTGGGTG |
| 256 | PSMB8_008 | AGTGTCGGCAGCCTCCAAGCT |
| 257 | PSMB8_009 | AGCCTGAAATCTTTCATCTTA |
| 258 | PSMB8_010 | ATCTTATAGGGTCCTGGACTC |
| 259 | PSMB8_011 | CTGAGAGCCGAGTCCCATGTT |
| 260 | PSMB8_012 | TCATTTGTCCACAGTGTACCA |
| 261 | PSMB8_013 | ACCCAACCATCTTCCTTCATG |
| 262 | PSMB8_014 | TCCACAGTGTACCACATGAAG |
| 263 | PSMB8_015 | TACTTTCACCCAACCATCTTC |
| 264 | MCL1_001 | TCAGCCAGGCGGCGGCGGCGA |
| 265 | MCL1_002 | AGGCCAAACATTGCCAGTCGC |
| 266 | MCL1_003 | TTTTGAGGCCAAACATTGCCA |
| 267 | MCL1_004 | GCCTCAAAAGAAACGCGGTAA |
| 268 | MCL1_005 | GCTACGGAGAAGGAGGCCTCG |
| 269 | MCL1_006 | TTCGCGCCCACCCGCCGCGCG |
| 270 | MCL1_007 | TGTCCTTGGCGCCGGTGGCCT |
| 271 | MCL1_008 | ATGTCCAGTTTCCGAAGCATG |
| 272 | MCL1_009 | TTTCTCAGGCATGCTTCGGAA |
| 273 | MCL1_010 | TCAGGCATGCTTCGGAAACTG |
| 274 | MCL1_011 | ACATCGTCTTCGTTTTTGATG |
| 275 | MCL1_012 | TTACGCCGTCGCTGAAAACAT |
| 276 | MCL1_013 | AGCGACGGCGTAACAAACTGG |
| 277 | MCL1_014 | GCCACAAAGGCACCAAAAGAA |
| 278 | MCL1_015 | TGGTCTTCAAGTGTTTAGCCA |
| 279 | MCL1_016 | TTTTGGTGCCTTTGTGGCTAA |
| 280 | MCL1_017 | GTGCCTTTGTGGCTAAACACT |
| 281 | MCL1_018 | TTGGTTTATGGTCTTCAAGTG |
| 282 | MCL1_019 | TGGCTAAACACTTGAAGACCA |
| 283 | MCL1_020 | TGCTAATGGTTCGATGCAGCT |
| 284 | MCL1_021 | TCCTTACGAGAACGTCTGTGA |
| 285 | MCL1_022 | ACTAGCCAGTCCCGTTTTGTC |
| 286 | MCL1_023 | TTTAACTAGCCAGTCCCGTTT |
| 287 | MCL1_024 | ATCCTTAAGGCAAACTTACCC |
| 288 | MCL1_025 | TTTTTTGTTTTCTAGGATGGG |
| 289 | MCL1_026 | TTTTCTAGGATGGGTTTGTGG |
| 290 | MCL1_027 | TAGGATGGGTTTGTGGAGTTC |
| 291 | MCL1_028 | TGGAGTTCTTCCATGTAGAGG |
| 292 | MCL1_029 | CAGGTGTTGCTGGAGTAGGAG |
| 293 | MCL1_030 | GCATATCTAATAAGATAGCCT |
| 294 | PSMB5_001 | TGCCCACACTAGACATGGCGC |
| 295 | PSMB5_002 | GGACTTGGGGGTCGTGCAGAT |
| 296 | PSMB5_003 | GATTCCTGGCTCTTCTGGGAC |
| 297 | PSMB5_004 | TGTTTTCCTCTGATCTTAACA |
| 298 | PSMB5_005 | CTCTGATCTTAACAGTTCCGC |
| 299 | PSMB5_006 | GAAGCTCATAGATTCGACATT |
| 300 | PSMB5_007 | GAGGCAGCTGCTACAGAGATG |
| 301 | PSMB5_008 | TACTGATACACCATGTTGGCA |
| 302 | PSMB5_009 | CTGCTAACCTCATCTCCCTTT |
| 303 | PSMB5_010 | CAGGCCTCTACTACGTGGACA |
| 304 | PSMB5_011 | AGGGGCCACCTTCTCTGTAGG |
| 305 | PSMB5_012 | AGGGGGTAGAGCCACTATACT |
| 306 | CALR_001 | GATTCGATCCAGCGGGAAGTC |
| 307 | CALR_002 | CCAAAATCTGACTTGTGTTTG |
| 308 | CALR_003 | GCAAATTCGTTCTCAGTTCCG |
| 309 | CALR_004 | TCCTCGTCACCGTAGAACTTG |
| 310 | CALR_005 | TCTTTCTCCTCGTCACCGTAG |
| 311 | CALR_006 | CAGACAAGCCAGGATGCACGC |
| 312 | CALR_007 | TTGCTGAAAGGCTCGAAACTG |
| 313 | CALR_008 | TGCTCTGTCGGCCAGTTTCGA |
| 314 | CALR_009 | GAGCCTTTCAGCAACAAAGGC |
| 315 | CALR_010 | AGCAACAAAGGCCAGACGCTG |
| 316 | CALR_011 | ACCGTGAACTGCACCACCAGC |
| 317 | CALR_012 | CTAATAGTTTGGACCAGACAG |
| 318 | CALR_013 | GACCAGACAGACATGCACGGA |
| 319 | CALR_014 | CCACCACCCCCAGGCACACCT |
| 320 | CALR_015 | CACACCTGTACACACTGATTG |
| 321 | CALR_016 | TCTTCTTGGGTGGCAGGAAGT |
| 322 | CALR_017 | AAGCATCAGGATCCTTTATCT |
| 323 | CALR_018 | CTTCTCCCTTCTGCAGGGTGA |
| 324 | CALR_019 | TGGGTGGATCCAAGTGCCCTT |
| 325 | CALR_020 | GCGTGCTGGGCCTGGACCTCT |
| 326 | CALR_021 | CTCCAAGTCTCACCTGCCAGA |
| 327 | CALR_022 | ACAACTTCCTCATCACCAACG |
| 328 | CALR_023 | TTACGCCCCACGTCTCGTTGC |
| 329 | CALR_024 | GCAACGAGACGTGGGGCGTAA |
| 330 | CALR_025 | TCCTTCATTTGTTTCTCTGCT |
| 331 | CALR_026 | ttgtcttcttcctcctccttA |
| 332 | CALR_027 | cgtttcttgtcttcttcctcc |
| 333 | CALR_028 | tcctcatcatcctccttgtcc |
| 334 | APLNR_001 | ACAACTACTATGGGGCAGACA |
| 335 | APLNR_002 | CAGTCTGTGTACTCACACTCA |
| 336 | APLNR_003 | GGAGCAGCCGGGAGAAGAGGC |
| 337 | APLNR_004 | GGACCTTCTTCTGCAAGCTCA |
| 338 | APLNR_005 | GGTGCTGGCCGCCCTCCTGGC |
| 339 | APLNR_006 | TGGTGCCCTTCACCATCATGC |
| 340 | APLNR_007 | GGCGATGAAGAAGTAACAGGT |
| 341 | APLNR_008 | CCCTGTGCTGGATGCCCTACC |
| 342 | APLNR_009 | ACCTCTTCCTCATGAACATCT |
| 343 | APLNR_010 | GACCCCCGCTTCCGCCAGGCC |
| 344 | APLNR_011 | TCGTGCATCTGTTCTCCACCC |
| 345 | BBS1_001 | CCCCACTTCCAGCAATGAGGC |
| 346 | BBS1_002 | GCCCTTTTGTTTTCCAGCGCT |
| 347 | BBS1_003 | TTTTCCAGCGCTGGCAGATTT |
| 348 | BBS1_004 | CAGCGCTGGCAGATTTACATG |
| 349 | BBS1_005 | CATGGGGATGGGGAATACAAG |
| 350 | BBS1_006 | AGCACCTTCAGGCGGGGCTGC |
| 351 | BBS1_007 | GGTCATCACCAGTGGTCCTTT |
| 352 | BBS1_008 | GAGGCAATTGGGGCAGGCTGA |
| 353 | BBS1_009 | GCCTGGTTCCAAAGGTCTTGT |
| 354 | BBS1_010 | CCTCTTTGGCCTGGTTCCAAA |
| 355 | BBS1_011 | TTTACCTCTTTGGCCTGGTTC |
| 356 | BBS1_012 | GAACCAGGCCAAAGAGGTAAA |
| 357 | BBS1_013 | CTTGCAGGGAGACGGCAGAGG |
| 358 | BBS1_014 | TCCATCCAGTCACTCAGGTAA |
| 359 | BBS1_015 | ACTTAGCTCCAGCTGCAGAAA |
| 360 | BBS1_016 | CAAATGCCTCCATTTCACTTA |
| 361 | BBS1_017 | TGCAGCTGGAGCTAAGTGAAA |
| 362 | BBS1_018 | TAAACCAACACAAGTCCAACT |
| 363 | BBS1_019 | CGCTTCTTGTTTGCAGATGAG |
| 364 | BBS1_020 | CAGATGAGCCTTCCCAGCGTC |
| 365 | BBS1_021 | TGGCCAGTTTGATGTTGAGTT |
| 366 | BBS1_022 | CATTGCGGCAGGCCGCGGCAA |
| 367 | BBS1_023 | ATGTTGAGTTCCGGCTTGCCG |
| 368 | BBS1_024 | TTCCACAGAGACTCCAAGCAC |
| 369 | BBS1_025 | TCGTGACAAGGCCCTGCTCAA |
| 370 | BBS1_026 | CTTTGGCCGGTACGGGCGGGA |
| 371 | BBS1_027 | GCCGGTACGGGCGGGAGGACA |
| 372 | BBS1_028 | CACTGTCCACTTCCCTAGGTG |
| 373 | BBS1_029 | TAGAGGGAGGAAGTGAGGTGG |
| 374 | BBS1_030 | ATGGCCTGGGCTGGTGGGGGA |
| 375 | BBS1_031 | GGGGCACATTGAGTTTCATGG |
| 376 | BBS1_032 | CGTGGATCAGACACTGCGAGA |
| 377 | BBS1_033 | TCCACCCACCCTCTCCATAGG |
| 378 | BBS1_034 | AGCTCACACTTCACCTGCAGA |
| 379 | BBS1_035 | TCCCCAAACTTAGGTACCCTT |
| 380 | BBS1_036 | TGGAGAGTCTCAGTAACAAGG |
| 381 | BBS1_037 | GCCTTCTCGAAGCACCAGCAC |
| 382 | BBS1_038 | ACAGCAGCTCAGGTCTCAGGC |
| 383 | RFX5_001 | TTCTGCACGGCCTTGCTGTGG |
| 384 | RFX5_002 | TCCTCTTCCCCACAGCAAGGC |
| 385 | RFX5_003 | TCCTGCCTCTGTTCTCTCCTA |
| 386 | RFX5_004 | TGTACATCTTGCTGAGGTAGG |
| 387 | RFX5_005 | TGACAATGACAAGCTGTATCT |
| 388 | RFX5_006 | TCTCCAGTGGTGGGTCCTGAG |
| 389 | RFX5_007 | TTTCTGTAGCTCAGAGCCAAG |
| 390 | RFX5_008 | TGTAGCTCAGAGCCAAGTACA |
| 391 | RFX5_009 | GCAGACAGGTGTCAGTGTGCT |
| 392 | RFX5_010 | CTTTGGCAGACAGGTGTCAGT |
| 393 | RFX5_011 | ATGTCAGGGAAGATCTCTCTG |
| 394 | RFX5_012 | GCAAGATCATCAGAGAGATCT |
| 395 | RFX5_013 | ACTTGCATCAGATATTGCTAC |
| 396 | RFX5_014 | GGTCAAGTCCAGGCAGGGGTG |
| 397 | RFX5_015 | GTACTTACACTCTCAGAACCC |
| 398 | RFX5_016 | AGGATCCGCTCTGCCCAGTCA |
| 399 | RFX5_017 | GTACCTCTGCAGAAGAGGACG |
| 400 | RFX5_018 | GATGACCGTTCCCGAGGTGCA |
| 401 | RFX5_019 | GTTTAGATGACCGTTCCCGAG |
| 402 | RFX5_020 | GAGAACCCAGAGGGTGGAGCC |
| 403 | RFX5_021 | CTTTTTAGCCTCCTAAGGATC |
| 404 | RFX5_022 | GCCTCCTAAGGATCTGGAAGC |
| 405 | RFX5_023 | AGGGCACCTGAAGAAAGCCTG |
| 406 | RFX5_024 | TTCAGGTGCCCTGAAAGTGGC |
| 407 | RFX5_025 | CCTGGACCTGGACCTGGGCCT |
| 408 | RFX5_026 | GCTGGTGGAGCCTGCCCACTG |
| 409 | RFX5_027 | CTGCTTTAGCTGGTGGAGCCT |
| 410 | RFX5_028 | GCATCACTTGCTGTATCCTCT |
| 411 | RFX5_029 | CTTTTGGCATCACTTGCTGTA |
| 412 | RFX5_030 | GAGGGCGCCCCCGTTTCCTTT |
| 413 | RFX5_031 | CCCACTTCCACCTGACTTTTT |
| 414 | RFX5_032 | AGCCTCTCCCATTGGCCCTGG |
| 415 | RFX5_033 | GAAACAGTACCATCTCCCTGA |
| 416 | RFX5_034 | GTATGCTGGGAACCGGGGCCC |
| 417 | RFX5_035 | CAAAGGAGGAAGGGGCCCCGG |
| 418 | RFX5_036 | TCTTCTGCTTCTTTGGTATGC |
| 419 | RFX5_037 | AGGGGACCAAGGGAATTTTAT |
| 420 | RFX5_038 | GCTTCTGCTGCCCTTGATGAC |
| 421 | RFX5_039 | CCAAAGGAAAAGCCTCCTTTT |
| 422 | RFX5_040 | CTTTGGCAAAGGGAGAGGTAG |
| 423 | RFX5_041 | TTACCCTGTGGTGCAGTGTCT |
| 424 | RFX5_042 | GCAAAGGGAGAGGTAGACACT |
| 425 | RFX5_043 | AGTCTTTATTACCCTGTGGTG |
| 426 | RFX5_044 | AAGCACATGCTCCTTTAAGTC |
| 427 | RFX5_045 | TGCTCCTGGGATAAGGAACTT |
| 428 | RFX5_046 | GGTCTTTATGCTCCTGGGATA |
| 429 | RFXAP_001 | GAGGATCTAGAGGACGAGGAG |
| 430 | RFXAP_002 | CGCTGCTTGGCCACCTGGCTC |
| 431 | RFXAP_003 | TTGCACATCCACGGTTTGCGC |
| 432 | RFXAP_004 | TACTTGTCCTTGTACATCTTG |
| 433 | RFXAP_005 | CCGCGCTGCCAGTCGAGGCAG |
| 434 | RFXAP_006 | ACGTTTCCCGCGCTGCCAGTC |
| 435 | RFXAP_007 | CATTTTTATCATTTATCCCAG |
| 436 | RFXAP_008 | TCATTTATCCCAGGAAAGTGC |
| 437 | RFXAP_009 | ACAATGGAGAGTATGTTATCT |
| 438 | RFXAP_010 | TCCCAGGAAAGTGCAGATAAC |
| 439 | RFXAP_011 | TTTAACAATGGAGAGTATGTT |
| 440 | RFXAP_012 | GGGATCGTCCTGCAAGACCTA |
| 441 | RFXAP_013 | ACACTTGTTCTAAAAGAGTAG |
| 442 | RFXAP_014 | ATTTAACACTTGTTCTAAAAG |
| 443 | RFXAP_015 | CCAGTCTTTTTTGATTTAACA |
| 444 | RFXAP_016 | GAACAAGTGTTAAATCAAAAA |
| 445 | RFXAP_017 | CAAACAGATATTTACCAGTCT |
| 446 | RFXAP_018 | TTTTCTTTCTAAGTCGTTACT |
| 447 | RFXAP_019 | TTTCTAAGTCGTTACTAAGAA |
| 448 | RFXAP_020 | TAAGTCGTTACTAAGAAGTCC |
| 449 | RFXAP_021 | TGTAAAAATTGCACTACTTCT |
| 450 | RFXAP_022 | ATAGCTGTTGCTGTTTCTGTA |
| 451 | RFXAP_023 | CAGAAACAGCAACAGCTATTA |
| 452 | RFXAP_024 | CTCCAAAACTTGCTGATTTAA |
| 453 | RFXAP_025 | GAGCAAAGACAACAGCAGTTT |
| 454 | RFXAP_026 | CAGGAACATCAATGTGAGGGA |
| 455 | RFXANK_001 | CCCATGGAGCTTACCCAGCCT |
| 456 | RFXANK_002 | CCTGCACCCCTGAGCCTGTGA |
| 457 | RFXANK_003 | CCAGCAGGCAGCTCCCTGAAG |
| 458 | RFXANK_004 | CGCAAATGCTCCTTCAGCTGG |
| 459 | RFXANK_005 | GAGAGATTGAGACCGTTCGCT |
| 460 | RFXANK_006 | CCAGGATGTGGGGGTCGGCAC |
| 461 | RFXANK_007 | TCCTGCCCCTACCCACGACAG |
| 462 | RFXANK_008 | ACGTGGTTCCCGCGCACAGCG |
| 463 | RFXANK_009 | CAGCCCGAGGCGCTGACCTCA |
| 464 | RFXANK_010 | CGGTATCCCAGGGCCACGGCA |
| 465 | RFXANK_011 | CCTGCCCCATCTCAGTGCAAC |
| 466 | CD58_001 | TTGGGAAAAACAGCTGATGAA |
| 467 | CD58_002 | TCTCCTAGGTTTCATCAGCTG |
| 468 | CD58_003 | ATCAGCTGTTTTTCCCAACAA |
| 469 | CD58_004 | CCAACAAATATATGGTGTTGT |
| 470 | CD58_005 | AAGGCACATTGCTTGGTACAT |
| 471 | CD58_006 | CATGTACCAAGCAATGTGCCT |
| 472 | CD58_007 | CATAGGACCTCTTTTAAAGGC |
| 473 | CD58_008 | TTTTTTCCATAGGACCTCTTT |
| 474 | CD58_009 | TCCTTTTGTTTTTTCCATAGG |
| 475 | CD58_010 | AAAGAGGTCCTATGGAAAAAA |
| 476 | CD58_011 | CAGTTCTGCAACTTTATCCTT |
| 477 | CD58_012 | AAAGATGAGAAAGCTCTGAAT |
| 478 | CD58_013 | TCATCTTTTAAAAATAGGGTT |
| 479 | CD58_014 | AAAATAGGGTTTATTTAGACA |
| 480 | CD58_015 | TTTAGACACTGTGTCAGGTAG |
| 481 | CD58_016 | GACACTGTGTCAGGTAGCCTC |
| 482 | CD58_017 | ATACTCATCTTCATCTGATGA |
| 483 | CD58_018 | GCGATTCCATTTCATACTCAT |
| 484 | CD58_019 | CAGAGTCTCTTCCATCTCCCA |
| 485 | CD58_020 | CATTGCTCCATAGGACAATCC |
| 486 | CD58_021 | CATCTTAAAATATATACTGGT |
| 487 | CD58_022 | TGGAAGATCATTTTCCATCTT |
| 488 | CD58_023 | AGATGGAAAATGATCTTCCAC |
| 489 | CD58_024 | ATACAACATCATCAATCATTT |
| 490 | CD58_025 | CTCACCGCTGCTTGGGATACA |
| 491 | CD58_026 | GTTATTTACTCACCGCTGCTT |
| 492 | CD58_027 | ACAACCTGTATCCCAAGCAGC |
| 493 | CD58_028 | TAGGTCATTCAAGACACAGAT |
| 494 | CD58_029 | AAAAGCATACATACCATTCAT |
| 495 | CD58_030 | TTTTAAAAAGCATACATACCA |
| 496 | CD58_031 | TGTCACATTTCAGAATACCTA |
| 497 | CD58_032 | TTCATTTTTAGGTATTCTGAA |
| 498 | CD58_033 | GGTATTCTGAAATGTGACAGA |
| 499 | COL17A1_001 | TTTTTCTTGGTTACATCCATA |
| 500 | COL17A1_002 | CTGCAGGTGGCTATGGTATGG |
| 501 | COL17A1_003 | TTTGTCTTTTTCTAGTTGTCA |
| 502 | COL17A1_004 | TCTTTTTCTAGTTGTCACTGA |
| 503 | COL17A1_005 | TAGTTGTCACTGAAACAGTAA |
| 504 | COL17A1_006 | GCATAGCCATTGCTGGTCCCG |
| 505 | COL17A1_007 | TTCCTGGCAGAAGGCGGGACC |
| 506 | COL17A1_008 | TCCAGCCGGCTCCCTCCACCA |
| 507 | COL17A1_009 | TTTCTCCAGCCGGCTCCCTCC |
| 508 | COL17A1_010 | TGTAGCCGCTGCTGCCATGAG |
| 509 | COL17A1_011 | CCTCTTGCAGCTGGAAGCACA |
| 510 | COL17A1_012 | AAAGGTTGAGCCTGGGGAGTT |
| 511 | COL17A1_013 | CTTTCAAAGGTTGAGCCTGGG |
| 512 | COL17A1_014 | AAAGGAAAACTCACGTTACCC |
| 513 | COL17A1_015 | ATCCCCTCTCCAGGGAGCTCC |
| 514 | COL17A1_016 | TTTGTTTCTCAGCATCTTCTT |
| 515 | COL17A1_017 | ACTCCGTCCTCTGGTTGAAGA |
| 516 | COL17A1_018 | TTTCTCAGCATCTTCTTCAAC |
| 517 | COL17A1_019 | TCAGCATCTTCTTCAACCAGA |
| 518 | COL17A1_020 | ACAGGGACAGAATTGGATGAT |
| 519 | COL17A1_021 | CTCAAGGGGAGTCGATCGGCA |
| 520 | COL17A1_022 | TTGGGGATGGGGAGTGTGTTG |
| 521 | COL17A1_023 | GTCTCCACAGTGCCTTTCTTG |
| 522 | COL17A1_024 | CAGTGTCAGGCACCTACGATG |
| 523 | COL17A1_025 | CACCCTGGACTCAGCACATCC |
| 524 | COL17A1_026 | ACAGTGTTTGGCATGCAGAAC |
| 525 | COL17A1_027 | GCATGCAGAACAATCTGGCCC |
| 526 | COL17A1_028 | TTGCAGCATATGGGGTGAAGA |
| 527 | COL17A1_029 | TTTCTCCCCAGCCTGCACCAC |
| 528 | COL17A1_030 | TCCCCAGCCTGCACCACAAGT |
| 529 | COL17A1_031 | TCTAGGATCAGGAACTTGCAG |
| 530 | COL17A1_032 | CACAAGGACTGCAAGTTCCTG |
| 531 | COL17A1_033 | GGGTGTCTTCTGAAAAAGAAG |
| 532 | COL17A1_034 | TTTTTTTAGGGTGTCTTCTGA |
| 533 | COL17A1_035 | AGAAGACACCCTAAAAAAAGA |
| 534 | COL17A1_036 | GGCCTGAGTCAGCATTGTAGG |
| 535 | COL17A1_037 | TTCTTACCATTAGCTTCGGCT |
| 536 | COL17A1_038 | TGGACACAGTCTTCAGGTCTC |
| 537 | COL17A1_039 | TCCTTTCAGGAGACCTGAAGA |
| 538 | COL17A1_040 | AGGAGACCTGAAGACTGTGTC |
| 539 | COL17A1_041 | CCTGTCTCTTTCACAGATATC |
| 540 | COL17A1_042 | ACAGATATCCACAGCTACGGC |
| 541 | COL17A1_043 | CCACGTACCCAGAGCAATGAG |
| 542 | COL17A1_044 | TTGCAGCGGAGGAGGTGAGGA |
| 543 | COL17A1_045 | TATTCTATCCATGCTGTCCCC |
| 544 | COL17A1_046 | TCCAGGTCTGCTCCCGCCGCG |
| 545 | COL17A1_047 | CTGTTCCATCATTAGCTTCTT |
| 546 | COL17A1_048 | CTTTTTCTTGCAGGAAATCTC |
| 547 | COL17A1_049 | GGGCCAGGGCTTCCTCGGAGA |
| 548 | COL17A1_050 | TTGCAGGAAATCTCCGAGGAA |
| 549 | COL17A1_051 | ATATCTTTCTGGTTTCAGGTG |
| 550 | COL17A1_052 | GGGCCTGGACTTCCCATGTCA |
| 551 | COL17A1_053 | TGGTTTCAGGTGACATGGGAA |
| 552 | COL17A1_054 | AGGTGACATGGGAAGTCCAGG |
| 553 | COL17A1_055 | CCTTTGTTCCTGCAGGAGATC |
| 554 | COL17A1_056 | TTCCTGCAGGAGATCGAGGGT |
| 555 | COL17A1_057 | GTCCTTGTGGACCTGGGTGGC |
| 556 | COL17A1_058 | ACCCTTTGGTCCTTGTGGACC |
| 557 | COL17A1_059 | TTACCCACGCTGCCTTTTTGA |
| 558 | COL17A1_060 | GGAGATCCTGGCATGGAAGGC |
| 559 | COL17A1_061 | TCTCCAGATCCAGGAGGCCCT |
| 560 | COL17A1_062 | CCCTTTCTCTCCAGATCCAGG |
| 561 | COL17A1_063 | TCCTCAGGGGCTGCTGGTGAA |
| 562 | COL17A1_064 | GGACCCACAGAACCTGGGACA |
| 563 | COL17A1_065 | CAAGAAGCAGCAAACTGACCT |
| 564 | COL17A1_066 | TTCTGCCGGGCAGGTCCTGTA |
| 565 | COL17A1_067 | ACACCAGGAAGTCCTACTTCA |
| 566 | COL17A1_068 | CTTTTTAGGTGACAAAGGACC |
| 567 | COL17A1_069 | GGTCCTGGTGGTCCCATTGGT |
| 568 | COL17A1_070 | GGTGACAAAGGACCAATGGGA |
| 569 | COL17A1_071 | CTTTAGGTGACCAGGGTGAGA |
| 570 | COL17A1_072 | GGTGACCAGGGTGAGAAAGGA |
| 571 | COL17A1_073 | TCCTTTGCAGGCGAGCCTGGC |
| 572 | COL17A1_074 | CAGGCGAGCCTGGCATGAGAG |
| 573 | COL17A1_075 | GCCCCGGGCTCACCAACAGCA |
| 574 | COL17A1_076 | CCTGGTGCTGTTGGTGAGCCC |
| 575 | COL17A1_077 | GAACACTTACCCATTGCTCCT |
| 576 | COL17A1_078 | CCAGGTCCTGCTGGCCCAGAC |
| 577 | COL17A1_079 | CTGGGTCTCCAGAAGGTCCTG |
| 578 | COL17A1_080 | TGCAGGTCTCACAGGACCCCA |
| 579 | COL17A1_081 | TTCCTGGTCGGCCAGGGGTAC |
| 580 | COL17A1_082 | GAAATTCACTTACCTTTTATT |
| 581 | COL17A1_083 | CTCTCTTCCTAGGTGAACCAG |
| 582 | COL17A1_084 | AGAGGGGTCATCGATGCTCAC |
| 583 | COL17A1_085 | TTCCTCAACCCCGTTTCCAGG |
| 584 | COL17A1_086 | CAGGCCCTGCCGGCCCAGCTG |
| 585 | COL17A1_087 | TATTTTCTTCTCTCTATAGAA |
| 586 | COL17A1_088 | TTCTCTCTATAGAAGTTCTTA |
| 587 | COL17A1_089 | CAAGGTCCCCCAGGCCCACCC |
| 588 | COL17A1_090 | CTAGGGGAGGGTTTGccaggc |
| 589 | COL17A1_091 | ccaggcccaccaggcccacca |
| 590 | COL17A1_092 | CTTCCTCTGCAGAAACCTTCC |
| 591 | COL17A1_093 | CCTCAGGTCCCCCAGGCCCCA |
| 592 | COL17A1_094 | ATGCCGGCTCTACTGTACCTT |
| 593 | COL17A1_095 | GGACTCAACCTTCAGGGACCA |
| 594 | COL17A1_096 | GGTCCCTGGGGGCCAGGTGGG |
| 595 | COL17A1_097 | TCACCTTTGGGTCCCTGGGGG |
| 596 | COL17A1_098 | GAttccaggtgatccaggtgt |
| 597 | COL17A1_099 | AGTTCTTACCTTCAGAAGGAC |
| 598 | COL17A1_100 | GTCACTTTCAGTTCTTACCTT |
| 599 | COL17A1_101 | TCTTTGCTGCAGGGGGATCAT |
| 600 | COL17A1_102 | CTGCAGGGGGATCATCAAGTA |
| 601 | COL17A1_103 | CTTTGTTCCTTGGTCGGCAGG |
| 602 | COL17A1_104 | TTCCTTGGTCGGCAGGTGACA |
| 603 | COL17A1_105 | GACTACTCAGAGCTGGCAAGC |
| 604 | COL17A1_106 | TTCCCGACAGCTTCGGGGTAC |
| 605 | COL17A1_107 | GACTATGCAGAGCTGAGTAGT |
| 606 | COL17A1_108 | TTTCTCTTCCTTCTGCCCAGC |
| 607 | COL17A1_109 | TCTTCCTTCTGCCCAGCTGCC |
| 608 | COL17A1_110 | AGCTGCATAGGTTGCCAGGGC |
| 609 | COL17A1_111 | GTGAAGCTGCAGGAGACAGGG |
| 610 | COL17A1_112 | CTGGAGATCTGGATTACAATG |
| 611 | COL17A1_113 | CAGGTCAGGGCCTACTGCAAG |
| 612 | COL17A1_114 | GAAGAAGTCCATGAGGTCCGC |
| 613 | COL17A1_115 | CTTGCTTTTGCAGCTTATGGA |
| 614 | COL17A1_116 | CCCAGGGGGTCCTTGAATGGC |
| 615 | COL17A1_117 | CAGCTTATGGAGCCATTCAAG |
| 616 | COL17A1_118 | GGTCCTGGAGTGCCCATCTCT |
| 617 | COL17A1_119 | CTTCCAGGTGACAGGGGCCCT |
| 618 | COL17A1_120 | TCCCTTGTGTCCTCGAGGGCC |
| 619 | COL17A1_121 | TCTCCTTTTTCTCCCTTGTGT |
| 620 | COL17A1_122 | AGGTGACCAAGTCTATGCTGG |
| 621 | DEFB134_001 | CCTGCCAGCACTGGATCCCAA |
| 622 | DEFB134_002 | TCTTTCTTTTCCTTTGGGATC |
| 623 | DEFB134_003 | TTTTCCTTTGGGATCCAGTGC |
| 624 | DEFB134_004 | CTTTGGGATCCAGTGCTGGCA |
| 625 | DEFB134_005 | GGATCCAGTGCTGGCAGGTAA |
| 626 | DEFB134_006 | TGATGATAATGAATTTATACC |
| 627 | DEFB134_007 | CTTCCAGGTATAAATTCATTA |
| 628 | DEFB134_008 | TTGTGCATTTCTGATGATAAT |
| 629 | DEFB134_009 | TAGCATTTCTTGTGCATTTCT |
| 630 | DEFB134_010 | ACTCTCATAGCATTCAAGTCT |
| 631 | DEFB134_011 | ACACAGCACTCCAGCTGAAAC |
| 632 | DEFB134_012 | CTTTGACACAGCACTCCAGCT |
| 633 | DEFB134_013 | AGCTGGAGTGCTGTGTCAAAG |
| 634 | DEFB134_014 | TTATGTCAGGGTGCAGGATTT |
| 635 | MLANA_001 | AACTTACTCTTCAGCCGTGGT |
| 636 | MLANA_002 | TCTATCTCTTGGGCCAGGGCC |
| 637 | MLANA_003 | GTCTTCTACAATACCAACAGC |
| 638 | MLANA_004 | CCAACCATCAAGGCTCTGTAT |
| 639 | MLANA_005 | AGCAGTGGGAACTTTACCAAC |
| 640 | MLANA_006 | TCCTGAAATGTAAATTGATAA |
| 641 | MLANA_007 | TCAATTTACATTTCAGGATAA |
| 642 | MLANA_008 | CATTTCAGGATAAAAGTCTTC |
| 643 | MLANA_009 | AGGATAAAAGTCTTCATGTTG |
| 644 | MLANA_010 | CTGTCCCGATGATCAAACCCT |
| 645 | MLANA_011 | TCTTGAAGAGACACTTTGCTG |
| 646 | MLANA_012 | ATCATCGGGACAGCAAAGTGT |
| 647 | MLANA_013 | TCAATTTACATTTCAGGATAA |
| 648 | MLANA_014 | CATTTCAGGATAAAAGTCTTC |
| 649 | MLANA_015 | AGGATAAAAGTCTTCATGTTG |
| 650 | MLANA_016 | CTGTCCCGATGATCAAACCCT |
| 651 | MLANA_017 | TCTTGAAGAGACACTTTGCTG |
| 652 | MLANA_018 | ATCATCGGGACAGCAAAGTGT |
| 653 | MLANA_019 | TTGTTCTCACAGGTTCCCAAT |
| 654 | MLANA_020 | TCATAAGCAGGTGGAGCATTG |
| 655 | CD3D_001 | TCTCTGGCCTGGTACTGGCTA |
| 656 | CD3D_002 | CCCTTTAGTGAGCCCCTTCAA |
| 657 | CD3D_003 | GTGAGCCCCTTCAAGATACCT |
| 658 | CD3D_004 | TGAATTGCAATACCAGCATCA |
| 659 | CD3D_005 | CCAGGTCCAGTCTTGTAATGT |
| 660 | CD3D_006 | TCCTTGTATATATCTGTCCCA |
| 661 | CD3D_007 | GGAGTCTTCTGCTTTGCTGGA |
| 662 | CD3D_008 | CTGGACATGAGACTGGAAGGC |
| 663 | CD3D_009 | TCTTCTCCTCTCTTAGCCCCT |
| 664 | CD3D_010 | CTCCAAGGTGGCTGTACTGAG |
| 665 | CD3G_001 | CCGGAGGACAGAGACTGACAT |
| 666 | CD3G_002 | TCATTTCAGGAAACCACTTGG |
| 667 | CD3G_003 | AGGAAACCACTTGGTTAAGGT |
| 668 | CD3G_004 | GCTTCTGCATCACAAGTCAGA |
| 669 | CD3G_005 | AACCATGTGATATTTTTGGCT |
| 670 | CD3G_006 | TCTTCAGTTAGGAAGCCGATC |
| 671 | CD3G_007 | AAGATGGGAAGATGATCGGCT |
| 672 | CD3G_008 | CACTGATACATCCCTCGAGGG |
| 673 | CD3G_009 | ACTTGTTCTGTGATCCTTTAC |
| 674 | CD3G_010 | TCTCTCCTTTTCCCTACAGTG |
| 675 | CD3G_011 | GTTCAATGCAGTTCTGACACA |
| 676 | CD3G_012 | CCTACAGTGTGTCAGAACTGC |
| 677 | CD3G_013 | AGCAAAGAGAAAGCCAGATAT |
| 678 | CD3G_014 | TCTTTGCTGAAATCGTCAGCA |
| 679 | CD3G_015 | CTGAAATCGTCAGCATTTTCG |
| 680 | CD3G_016 | GTCCTTGCTGTTGGGGTCTAC |
| 681 | CD3G_017 | CCTCTCGACTGGCGAACTCCA |
| 682 | CD3G_018 | ttttttgTGCAGCTTCAGACA |
| 683 | CD3G_019 | TGCAGCTTCAGACAAGCAGAC |
| 684 | CD3G_020 | TTCTTCATCCCCTTACCTGGT |
| 685 | CD3G_021 | CAGCCCCTCAAGGATCGAGAA |
| 686 | CD3G_022 | CTTGAAGGTGGCTGTACTGGT |
| 687 | CD3G_023 | CAGGTACTTTGGCCCAGTCAA |
| 688 | CD247_001 | TGAGGGAAAGGACAAGATGAA |
| 689 | CD247_002 | ACCGCGGCCATCCTGCAGGCA |
| 690 | CD247_003 | TCTCTTGGCACAGAGGCACAG |
| 691 | CD247_004 | GGATCCAGCAGGCCAAAGCTC |
| 692 | CD247_005 | GCCTGCTGGATCCCAAACTCT |
| 693 | CD247_006 | CTTTCTGTGTTGCAGTTCAGC |
| 694 | CD247_007 | TGTGTTGCAGTTCAGCAGGAG |
| 695 | CD247_008 | TTATCTGTTATAGGAGCTCAA |
| 696 | CD247_009 | CCCCCATCTCAGGGTCCCGGC |
| 697 | CD247_010 | GACAAGAGACGTGGCCGGGAC |
| 698 | CD247_011 | CTAGCAGAGAAGGAAGAACCC |
| 699 | CD247_012 | ATCCCAATCTCACTGTAGGCC |
| 700 | CD247_013 | ACTCCCAAACAACCAGCGCCG |
| 701 | CD247_014 | TGATTTGCTTTCACGCCAGGG |
| 702 | CD247_015 | CTTTCACGCCAGGGTCTCAGT |
| 703 | CD247_016 | ACGCCAGGGTCTCAGTACAGC |
| 704 | SOX10_001 | CTGGCGCCGTTGACGCGCACG |
| 705 | SOX10_002 | TTGTGCTGCATACGGAGCCGC |
| 706 | SOX10_003 | ATGTGGCTGAGTTGGACCAGT |
| 707 | SOX10_004 | GCATCCACACCAGGTGGTGAG |
| 708 | SOX10_005 | ACTACTCTGACCATCAGCCCT |
| 709 | SOX10_006 | GGGCCGGGACAGTGTCGTATA |
| 710 | RPL23_001 | ttttttCCGGCGTTCAAGATG |
| 711 | RPL23_002 | CGGCGTTCAAGATGTCGAAGC |
| 712 | RPL23_003 | GCACCAGAGGACCCACCACGT |
| 713 | RPL23_004 | TATCCACAGGACGTGGTGGGT |
| 714 | RPL23_005 | CTTGGGTCTTCCGGTAGGAGC |
| 715 | RPL23_006 | tttacattcttttGTAGGAGC |
| 716 | RPL23_007 | cattcttttGTAGGAGCCAAA |
| 717 | RPL23_008 | TAGGAGCCAAAAACCTGTATA |
| 718 | RPL23_009 | TTGACTGTGGCCATCACCATG |
| 719 | RPL23_010 | CCTTTCTTGACTGTGGCCATC |
| 720 | RPL23_011 | TGAGCTCTGGTTTGCCTTTCT |
| 721 | RPL23_012 | CTCACCCTTTTTTCTGAGCTC |
| 722 | RPL23_013 | GTTGTCGAATGACCACTGCTG |
| 723 | RPL23_014 | TTCTCTCAGTACATCCAGCAG |
| 724 | RPL23_015 | TACGGTATGACTTTCGTTGTC |
| 725 | RPL23_016 | TTGTTCACTATGACTCCTGCA |
| 726 | RPL23_017 | TTTATTTTGAAGATAATGCAG |
| 727 | RPL23_018 | TTTTGAAGATAATGCAGGAGT |
| 728 | RPL23_019 | AAGATAATGCAGGAGTCATAG |
| 729 | RPL23_020 | ATCTCGCCTTTATTGTTCACT |
| 730 | RPL23_021 | CTACCTTTCATCTCGCCTTTA |
| 731 | RPL23_022 | ttttatttttttaATGCAGGT |
| 732 | RPL23_023 | tttttttaATGCAGGTTCTGC |
| 733 | RPL23_024 | CTACTGGTCCTGTAATGGCAG |
| 734 | RPL23_025 | ATGCAGGTTCTGCCATTACAG |
| 735 | RPL23_026 | CAAATATACTGGAGAATCATG |
| 736 | RPL23_027 | CCTTCCCTTTATATCCACAGG |
| 737 | PTCD2_001 | GGCCCTCGAATCGAGTTCTCC |
| 738 | PTCD2_002 | GTGTATCCTGGGGTGGGAGGC |
| 739 | PTCD2_003 | TTTCTCTGATTTTTAGCTAAA |
| 740 | PTCD2_004 | TCTGATTTTTAGCTAAAAGAT |
| 741 | PTCD2_005 | ACCACATTATCTGTAAGTAGG |
| 742 | PTCD2_006 | ATTTCACCACATTATCTGTAA |
| 743 | PTCD2_007 | GCTAAAAGATACCTACTTACA |
| 744 | PTCD2_008 | TTGAAATTCTTTTAATTTCAC |
| 745 | PTCD2_009 | TTTTGTTGAAATTCTTTTAAT |
| 746 | PTCD2_010 | AACAAAAGAAAGTGGCTGTTG |
| 747 | PTCD2_011 | GTGCCAGAAAGATTACATGCA |
| 748 | PTCD2_012 | AAGTTTCTAAAATACGTTTCT |
| 749 | PTCD2_013 | TTTTTCAAGTTTCTAAAATAC |
| 750 | PTCD2_014 | TTCCAGAAACGTATTTTAGAA |
| 751 | PTCD2_015 | GAAACTTGAAAAAGAAACTGA |
| 752 | PTCD2_016 | GCCAGTTCCACATGGTCCCGA |
| 753 | PTCD2_017 | TGTGAGTCTCGGGACCATGTG |
| 754 | PTCD2_018 | ATTACCAGGTACCATGCAGAG |
| 755 | PTCD2_019 | TACTCCCCCAAAGTGAAATTT |
| 756 | PTCD2_020 | ACTTTGGGGGAGTATAAATTT |
| 757 | PTCD2_021 | GGGGAGTATAAATTTGGACCG |
| 758 | PTCD2_022 | GACCGCTTTTTGTGAGGTTGT |
| 759 | PTCD2_023 | TGAGGTTGTGTTACGAGTTGG |
| 760 | PTCD2_024 | ATGAGCTCCACTGCAGATTCC |
| 761 | PTCD2_025 | CGAGGTTTCTTCTCAGACTCC |
| 762 | PTCD2_026 | TTCTCAGACTCCACATCATTC |
| 763 | PTCD2_027 | ATAAATAACATATCCATCAAA |
| 764 | PTCD2_028 | CCTTTGATAAATAACATATCC |
| 765 | PTCD2_029 | TATTTGCCTTTGATAAATAAC |
| 766 | PTCD2_030 | ATGGATATGTTATTTATCAAA |
| 767 | PTCD2_031 | TCAAAGGCAAATATAAAAGTA |
| 768 | PTCD2_032 | ATCTCTATCAATACTTGCAAA |
| 769 | PTCD2_033 | GCAGGTGCTTTGCAAGTATTG |
| 770 | PTCD2_034 | CAAGTATTGATAGAGATGAAA |
| 771 | PTCD2_035 | GTGAACTTCACATCTTGGTTT |
| 772 | PTCD2_036 | TAGCAAATTGCAAAAGCAAGA |
| 773 | PTCD2_037 | CAATTTGCTACAAACTGGTAA |
| 774 | PTCD2_038 | AAAGACTCAGGGCTATTCTGT |
| 775 | PTCD2_039 | AGTAGAGCTTCTTCTCTTAAT |
| 776 | PTCD2_040 | AAAATCTGTACTACATTAAGA |
| 777 | PTCD2_041 | TCCTTTGAGTAGAGCTTCTTC |
| 778 | PTCD2_042 | CCTGATTCAGAGCTAATGCCA |
| 779 | PTCD2_043 | GCTGTGGCATTAGCTCTGAAT |
| 780 | PTCD2_044 | TTTCTCTTCCTTCTAGAATGA |
| 781 | PTCD2_045 | TCTTCCTTCTAGAATGAGATG |
| 782 | PTCD2_046 | AGAAAAAATGGACACAGCTTT |
| 783 | PTCD2_047 | TGGATTCATGATTTGAGAAAA |
| 784 | PTCD2_048 | TCAAATCATGAATCCAGAAAG |
| 785 | PTCD2_049 | ACTGGATATGGATTATAATCT |
| 786 | PTCD2_050 | CAACATATTTGACTGGATATG |
| 787 | PTCD2_051 | TCAGGTTTTCCAACATATTTG |
| 788 | PTCD2_052 | GAGTCTTTATCAGGTTTTCCA |
| 789 | PTCD2_053 | CTTCTGCAGCATTTTTTAGAG |
| 790 | PTCD2_054 | ATAAATTTCCTTCTGCAGCAT |
| 791 | PTCD2_055 | ACAAATTTTGATAAATTTCCT |
| 792 | PTCD2_056 | TCAAAATTTGTGAAAAGACAT |
| 793 | PTCD2_057 | TGAAAAGACATGTGTTCTCGG |
| 794 | PTCD2_058 | TGCAGCACTTGCATACTCACC |
| 795 | PTCD2_059 | CAGCTGGCCAAAGTGAGGGAA |
| 796 | PTCD2_060 | GCCACAAGGGCAGGCACATCC |
| 797 | PTCD2_061 | ATGAGATCTATGGGACACTGC |
| 798 | PTCD2_062 | CTGTCCCTGGGGGTGTGGCAG |
| 799 | PTCD2_063 | GATGCTGTGCTCTGCCACACC |
| 800 | PTCD2_064 | ATAGCAACGTGTGAGATTTCC |
| 801 | SRP54_001 | TTCCAAGGTCTGCTAGAACCA |
| 802 | SRP54_002 | AATTTCATTTATTTCTTTATT |
| 803 | SRP54_003 | GCATAGCATTCAATACCTGAA |
| 804 | SRP54_004 | ATTTATTTCTTTATTTTCAGG |
| 805 | SRP54_005 | TTTCTTTATTTTCAGGTATTG |
| 806 | SRP54_006 | TTTATTTTCAGGTATTGAATG |
| 807 | SRP54_007 | TTTTCAGGTATTGAATGCTAT |
| 808 | SRP54_008 | AGGTATTGAATGCTATGCTAA |
| 809 | SRP54_009 | ATATTAACATCTGCTTCCAAC |
| 810 | SRP54_010 | TTGGAAGCAGATGTTAATATT |
| 811 | SRP54_011 | TCTTAGTTGCTTCACTAGTTT |
| 812 | SRP54_012 | TGATGGTGGTTGGTGATTGGG |
| 813 | SRP54_013 | TTAAGACCAGATGCCATCTCT |
| 814 | SRP54_014 | TTTTGTTAAGACCAGATGCCA |
| 815 | SRP54_015 | AATACAGCATGCTGAATCATT |
| 816 | SRP54_016 | tttttaatttatttttggtat |
| 817 | SRP54_017 | atttatttttggtatttaGCT |
| 818 | SRP54_018 | tttttggtatttaGCTTGTAG |
| 819 | SRP54_019 | gtatttaGCTTGTAGACCCTG |
| 820 | SRP54_020 | GTGGGTGTCCATGCCTTAACT |
| 821 | SRP54_021 | GCTTGTAGACCCTGGAGTTAA |
| 822 | SRP54_022 | CTTTAGTGGGTGTCCATGCCT |
| 823 | SRP54_023 | TTTTCCTTTAGTGGGTGTCCA |
| 824 | SRP54_024 | CCACTCCCTTGCAATCCAACA |
| 825 | SRP54_025 | AACATGTTGTTGTTTTACCAC |
| 826 | SRP54_026 | TTGGATTGCAAGGGAGTGGTA |
| 827 | SRP54_027 | CTCTGGTAATAATATGCTAGC |
| 828 | SRP54_028 | AATCTTTTCTCACCCAGCTAG |
| 829 | SRP54_029 | TCACCCAGCTAGCATATTATT |
| 830 | SRP54_030 | ATATGTGCAGACACATTCAGA |
| 831 | SRP54_031 | TTTTCAAGTTTGAGGATTCAT |
| 832 | SRP54_032 | AAGTTTGAGGATTCATGAACT |
| 833 | SRP54_033 | AGGATTCATGAACTCTTTATC |
| 834 | SRP54_034 | GTTGGTCAAAAGCCCCTGGAA |
| 835 | SRP54_035 | TCTTCCAGGGGCTTTTGACCA |
| 836 | SRP54_036 | GTAGCATTCTGTTTTAGTTGG |
| 837 | SRP54_037 | ACCAACTAAAACAGAATGCTA |
| 838 | SRP54_038 | TGTATAGCTATATAACATGGA |
| 839 | SRP54_039 | TTAAATCATTTGTCCATGTTA |
| 840 | SRP54_040 | TCCATGTTATATAGCTATACA |
| 841 | SRP54_041 | TCTACTCCTTCAGAAGCAATG |
| 842 | SRP54_042 | AATTTCTCTACTCCTTCAGAA |
| 843 | SRP54_043 | ATTTTTAAATTTCTCTACTCC |
| 844 | SRP54_044 | AAAATTTTCATTTTTAAATTT |
| 845 | SRP54_045 | AAAATGAAAATTTTGAAATTA |
| 846 | SRP54_046 | TGGCGGCCACTTGTATCAACA |
| 847 | SRP54_047 | AAATTATTATTGTTGATACAA |
| 848 | SRP54_048 | TTCAAACAAAGAGTCTTCTTG |
| 849 | SRP54_049 | TTTGAAGAAATGCTTCAAGTT |
| 850 | SRP54_050 | AAGAAATGCTTCAAGTTGCTA |
| 851 | SRP54_051 | TATTTAAACTTTCTAGCAACC |
| 852 | SRP54_052 | AACTTTCTAGCAACCTGATAA |
| 853 | SRP54_053 | TAGCAACCTGATAACATTGTT |
| 854 | SRP54_054 | TGTGATGGATGCCTCCATTGG |
| 855 | SRP54_055 | AAAGCCTTAGCCTGGGCTTCA |
| 856 | SRP54_056 | TCTTTAAAAGCCTTAGCCTGG |
| 857 | SRP54_057 | TCACTATTACTGAGGCTACAT |
| 858 | SRP54_058 | AAGATAAAGTAGATGTAGCCT |
| 859 | SRP54_059 | CATGGCCATCAAGTTTTGTCA |
| 860 | SRP54_060 | TGGCAGCGACTCTGGaaaaaa |
| 861 | SRP54_061 | tattttctttttttttCCAGA |
| 862 | SRP54_062 | tttttttttCCAGAGTCGCTG |
| 863 | SRP54_063 | CAGAGTCGCTGCCACAAAAAG |
| 864 | SRP54_064 | ATTGGTACAGGGGAACATATA |
| 865 | SRP54_065 | AAAGGTTCAAAGTCATCTATA |
| 866 | SRP54_066 | CTAATAAAAGGCTGTGTTTTG |
| 867 | SRP54_067 | AACCTTTCAAAACACAGCCTT |
| 868 | SRP54_068 | AAAACACAGCCTTTTATTAGC |
| 869 | SRP54_069 | TTTTTTGTATCTTATAGGTAT |
| 870 | SRP54_070 | TATCTTATAGGTATGGGCGAC |
| 871 | SRP54_071 | TCTATCAGTCCTTCAATGTCG |
| 872 | SRP54_072 | AACTTCTCTATAAGTGCTTCA |
| 873 | SRP54_073 | CATTGTATTTCAGGTCAGTTT |
| 874 | SRP54_074 | AAATTGCTCATACATGTCTCG |
| 875 | SRP54_075 | AGGTCAGTTTACGTTGCGAGA |
| 876 | SRP54_076 | ATGATATTTTGAAATTGCTCA |
| 877 | SRP54_077 | CGTTGCGAGACATGTATGAGC |
| 878 | SRP54_078 | AAAATATCATGAAAATGGGCC |
| 879 | SRP54_079 | TGTTTAAATCTGTTGTAGGGG |
| 880 | SRP54_080 | AATCTGTTGTAGGGGATGATC |
| 881 | SRP54_081 | CTCATAAAATCTGTCCCAAAA |
| 882 | SRP54_082 | CTTTGCTCATAAAATCTGTCC |
| 883 | SRP54_083 | GGACAGATTTTATGAGCAAAG |
| 884 | SRP54_084 | GCCTTGCCATTGACTCCTGTT |
| 885 | SRP54_085 | TGAGCAAAGGAAATGAACAGG |
| 886 | SRP54_086 | TTTAGCCTTGCCATTGACTCC |
| 887 | SRP54_087 | GCACCATCCGTACTGTCTAGT |
| 888 | SRP54_088 | CTAAAAACTTTGGCACCATCC |
| 889 | SRP54_089 | GATTCTTCCTGGTTGTTTACT |
| 890 | SRP54_090 | GTAAACAACCAGGAAGAATCC |
| 891 | SRP54_091 | CCATCTGTGCAAACTTGGTAT |
| 892 | SRP54_092 | ACACAATATACCAAGTTTGCA |
| 893 | SRP54_093 | ATACCTCCCATCTTTTTTACC |
| 894 | SRP54_094 | CACAGATGGTAAAAAAGATGG |
| 895 | SRP54_095 | AAAAGTCCTTTGATACCTCCC |
| 896 | SRP54_096 | CCCTCAGGTGGCGACATGTCT |
| 897 | SRP54_097 | CCATCTGTGACTGGCTCACAT |
| 898 | SRP54_098 | TTGGTTCAATTTTGCCATCTG |
| 899 | SRP54_099 | GCCATTTGTTGGTTCAATTTT |
| 900 | SRP54_100 | ACTCTACTTCCCTACTTTTGC |
| 901 | SRP54_101 | CTCTAGGTGGTATGGCAGGAC |
| 902 | SRP54_102 | ATGTTGCCAGCAGCACCCTGT |
| 903 | SRP54_103 | AACAGGGTGCTGCTGGCAACA |
| 904 | SRP54_104 | CATATTATTGAATCCCATCAT |
| 905 | SRP54_105 | TTTACATATTATTGAATCCCA |
| 906 | SRP54_106 | TATTAAGGCATTTTCTTTACA |
| 907 | SRP54_107 | CTGAGACCTCAGCGTTTCCCT |
| 908 | SRP54_108 | CCCCCAATTCGCAAAAAGAAG |
| 909 | SRP54_109 | CCTTCTTTTTGCGAATTGGGG |
| 910 | SRP54_110 | CGAATTGGGGGGAAAGTGTAT |
| 911 | SRP54_111 | TTGCTTATCATGCACTCTTTC |
| 912 | SRP54_112 | Cttttcttctcgcccgctttt |
| 913 | SRP54_113 | ttctcgcccgcttttcccctc |
| 914 | SRP54_114 | ccctccttttctttttccttc |
| 915 | SRP54_115 | TCCCTTATATTaaagggagga |
| 916 | SRP54_116 | tttttccttccttctttcctc |
| 917 | SRP54_117 | cttccttctttcctccctttA |
| 918 | SRP54_118 | ctccctttAATATAAGGGAGA |
| 919 | SRP54_119 | CACAAAAACCATGTATTTCTC |
| 920 | SRP54_120 | ATATAAGGGAGAAATACATGG |
| 921 | SRP54_121 | TGGAAATCATTATATGTTTGC |
| 922 | SRP54_122 | CTTTAGATTTTCTTCTGTTTT |
| 923 | SRP54_123 | ACTTAAGTGTTATGATGGTGA |
| 924 | SRP54_124 | GATTTTCTTCTGTTTTCACCA |
| 925 | SRP54_125 | TTCTGTTTTCACCATCATAAC |
| 926 | SRP54_126 | CATCATGATTTAACTTAAGTG |
| 927 | SRP54_127 | ACCATCATAACACTTAAGTTA |
| 928 | SRP54_128 | AGTACTAAAATTTTACATCAT |
| 929 | SRP54_129 | GTACTTAAAGGTTTTTAATTA |
| 930 | SRP54_130 | CAAATGCAATGCTTGGCCTTC |
| 931 | SRP54_131 | ATTATCTCGAAGGCCAAGCAT |
| 932 | SRP54_132 | ACTACTGACCAGGACTGTTTA |
| 933 | SRP54_133 | ATTGAAACATTATTTAACTAC |
| 934 | SRP54_134 | TAAACAGTCCTGGTCAGTAGT |
| 935 | SRP54_135 | CAGCACTTTAATTGAAACATT |
| 936 | SRP54_136 | TTTTACAGCACTTTAATTGAA |
| 937 | SRP54_137 | AAGTTTATTTTACAGCACTTT |
| 938 | SRP54_138 | AATTAAAGTGCTGTAAAATAA |
| 939 | SRP54_139 | AGGATAACTAACCAAGATCTG |
| 940 | ERAP2_001 | TGTGTGAATTAACCATTGCAG |
| 941 | ERAP2_002 | ATGTTCCATTCTTCTGCAATG |
| 942 | ERAP2_003 | ACATTCACAGAGGATTTTACT |
| 943 | ERAP2_004 | GGGCAAGATGGCTGTTAAGCA |
| 944 | ERAP2_005 | CTGCTTAACAGCCATCTTGCC |
| 945 | ERAP2_006 | TTCTCAGTTCTCAGTGCCATC |
| 946 | ERAP2_007 | CCAGTAGCCACTAATGGGGAA |
| 947 | ERAP2_008 | CTTGGCAGGAGCTAAGGCTCC |
| 948 | ERAP2_009 | TCCACCCCAATCTCACCTCTC |
| 949 | ERAP2_010 | TTGCATCTGAGAAGATCGAAG |
| 950 | ERAP2_011 | CTGTGCAAGATGATAAACTGG |
| 951 | ERAP2_012 | AAGATCTTTGCTGTGCAAGAT |
| 952 | ERAP2_013 | TCATCTTGCACAGCAAAGATC |
| 953 | ERAP2_014 | ATGTATCTTGAATCTTCCTCT |
| 954 | ERAP2_015 | CTGGTTTCATGTATCTTGAAT |
| 955 | ERAP2_016 | AGTTCTTTTCCTGGTTTCATG |
| 956 | ERAP2_017 | TTCATGAGCAGGGTAACTCAA |
| 957 | ERAP2_018 | AGTTACCCTGCTCATGAACAA |
| 958 | ERAP2_019 | TCTGGAACCAGCAGTGCAATT |
| 959 | ERAP2_020 | AGGTGAGGCGTAAGTTTCTCT |
| 960 | ERAP2_021 | TAAAACCCTTCAAAGCCATCA |
| 961 | ERAP2_022 | AAGGGTTTTATAAAAGCACAT |
| 962 | ERAP2_023 | ACCACCAAGAGTTCTGTATGT |
| 963 | ERAP2_024 | TAAAAGCACATACAGAACTCT |
| 964 | ERAP2_025 | GCTGGGGGGGGTCTTTTCAC |
| 965 | ERAP2_026 | ACAGAATTCTTGCAGTAACAG |
| 966 | ERAP2_027 | AGCCAACCCAGGCACGCATGG |
| 967 | ERAP2_028 | AACAACGGTTCATCAAAGCAA |
| 968 | ERAP2_029 | CCTTGCTTTGATGAACCGTTG |
| 969 | ERAP2_030 | ATGAACCGTTGTTCAAAGCCA |
| 970 | ERAP2_031 | AATCAAGATACGAAGAGAGAG |
| 971 | ERAP2_032 | GCATGTTGGATAGTGCAATAT |
| 972 | ERAP2_033 | CTTTCTGTAGGTTAAGACAAT |
| 973 | ERAP2_034 | TGTAGGTTAAGACAATTGAAC |
| 974 | ERAP2_035 | AAAGTGATCTTCCAAAAGACC |
| 975 | ERAP2_036 | CAGTAGTTTCAAAGTGATCTT |
| 976 | ERAP2_037 | GAAGATCACTTTGAAACTACT |
| 977 | ERAP2_038 | AAACTACTGTAAAAATGAGTA |
| 978 | ERAP2_039 | TGATTTCCACTCTCTGAGTGG |
| 979 | ERAP2_040 | CACTCTCTGAGTGGCTTCACT |
| 980 | ERAP2_041 | TCTGGGGATGCATAGATGGAC |
| 981 | ERAP2_042 | ATTCCGTTTGTCTGGGGATGC |
| 982 | ERAP2_043 | CCAGGTGTCCATCTATGCATC |
| 983 | ERAP2_044 | ATAAAAATCAAGTAGCTTCAG |
| 984 | ERAP2_045 | CAGGCATCACTGAAGCTACTT |
| 985 | ERAP2_046 | GAGAGTGGATAGTAGATATCA |
| 986 | ERAP2_047 | TGAAAAGTACTTTGATATCTA |
| 987 | ERAP2_048 | ATATCTACTATCCACTCTCCA |
| 988 | ERAP2_049 | TTAGATTTAATTGCTATTCCT |
| 989 | ERAP2_050 | CATGGCTCCAGGTGCAAAGTC |
| 990 | ERAP2_051 | ATTGCTATTCCTGACTTTGCA |
| 991 | ERAP2_052 | CACCTGGAGCCATGGAAAATT |
| 992 | ERAP2_053 | TCGGAAGCAGAAGAGGTCTTG |
| 993 | ERAP2_054 | ACCCCAAGACCTCTTCTGCTT |
| 994 | ERAP2_055 | CCTCCTAGTGGTTTGGCAACC |
| 995 | ERAP2_056 | GCAACCTGGTCACAATGGAAT |
| 996 | ERAP2_057 | CAAAACCCTCCTTAAGCCAAA |
| 997 | ERAP2_058 | GCTTAAGGAGGGTTTTGCAAA |
| 998 | ERAP2_059 | CAAAATACATGGAACTTATCG |
| 999 | ERAP2_060 | TCCCTGTTTAGGATGACTATT |
| 1000 | ERAP2_061 | GGATGACTATTTTTTGAATGT |
| 1001 | ERAP2_062 | TAATTACTTCAAAACACACAT |
| 1002 | ERAP2_063 | AATGTGTGTTTTGAAGTAATT |
| 1003 | ERAP2_064 | AAGTAATTACAAAAGATTCAT |
| 1004 | ERAP2_065 | GAGATAGGGCGGGATGAATTC |
| 1005 | ERAP2_066 | CGCTGGTTTGGAGATAGGGCG |
| 1006 | ERAP2_067 | AGTCGGGGTTTCCGCTGGTTT |
| 1007 | ERAP2_068 | CTGTATTTGAGTCGGGGTTTC |
| 1008 | ERAP2_069 | aaaaaaaacaaaagagttgaa |
| 1009 | ERAP2_070 | aactcttttgtttttttttAA |
| 1010 | ERAP2_071 | tttttttttAAAGGGAGCTTG |
| 1011 | ERAP2_072 | AAGGGAGCTTGTATTTTGAAT |
| 1012 | ERAP2_073 | TCCTCACCCAGAAAATCCTTG |
| 1013 | ERAP2_074 | AATATGCTCAAGGATTTTCTG |
| 1014 | ERAP2_075 | TGGAATTTCTCCTCACCCAGA |
| 1015 | ERAP2_076 | TGGGTGAGGAGAAATTCCAGA |
| 1016 | ERAP2_077 | AGTACTGAATTATTCCTTTCT |
| 1017 | ERAP2_078 | TATAGCTGAACTTCTTTAAGT |
| 1018 | ERAP2_079 | ACAGACTGCTCCACAAGTCAT |
| 1019 | ERAP2_080 | TAAACAACTCTACAAAACAAG |
| 1020 | ERAP2_081 | TTCTTGTTTTGTAGAGTTGTT |
| 1021 | ERAP2_082 | TAGAGTTGTTTAGAAAGTGAT |
| 1022 | ERAP2_083 | GAAAGTGATTTTACATCTGGT |
| 1023 | ERAP2_084 | CATCTGGTGGAGTTTGTCATT |
| 1024 | ERAP2_085 | TCATTCGGATCCCAAGATGAC |
| 1025 | ERAP2_086 | CCCCAGAAAGGCGAGCTGAAA |
| 1026 | ERAP2_087 | ACCTCTGCATTTTCCCCCAGA |
| 1027 | ERAP2_088 | AGCTCGCCTTTCTGGGGGAAA |
| 1028 | ERAP2_089 | TGGGGGAAAATGCAGAGGTCA |
| 1029 | ERAP2_090 | TGGAGAGTCCATGTAGTCATC |
| 1030 | ERAP2_091 | ACCACCAGCAGGGGGATTCCT |
| 1031 | ERAP2_092 | CAGGAAGACCCTGAATGGAGG |
| 1032 | ERAP2_093 | CTCTCTGTCATAGGTACCTGT |
| 1033 | ERAP2_094 | GAATGTGTCTGTGGATCACAT |
| 1034 | ERAP2_095 | ATTTTAGAATGTGTCTGTGGA |
| 1035 | ERAP2_096 | AGGTAGATCCAGAGTATCTAA |
| 1036 | ERAP2_097 | ACCCAACTGGTCTTTTCAGGT |
| 1037 | ERAP2_098 | AGTCCACATTAAATTTCACCC |
| 1038 | ERAP2_099 | ATGTGGACTCAAATGGTTACT |
| 1039 | ERAP2_100 | TCTAGGGTCAGTCTCCCTGCA |
| 1040 | ERAP2_101 | TTTTATACTTCAGTGCAGGGA |
| 1041 | ERAP2_102 | TACTTCAGTGCAGGGAGACTG |
| 1042 | ERAP2_103 | ATGTTGGAGGTAGTAAGTCAT |
| 1043 | ERAP2_104 | AGAGATATCTGAAATATTCCT |
| 1044 | ERAP2_105 | CCACATGATGGACAGAAGGAA |
| 1045 | ERAP2_106 | AGATATCTCTGAAAACCTCAA |
| 1046 | ERAP2_107 | TGCAGCGTTACCTTCTTCAGT |
| 1047 | ERAP2_108 | CCTGTCAATCACTGGCTTAAA |
| 1048 | ERAP2_109 | AGCCAGTGATTGACAGGCAAA |
| 1049 | ERAP2_110 | TGGATGCAAGGAGCATGGTTC |
| 1050 | ERAP2_111 | CACTGGATTCCATCCACTGGG |
| 1051 | ERAP2_112 | ATTTTCCACTGGATTCCATCC |
| 1052 | ERAP2_113 | TTCATTTTTATGCTTGATATT |
| 1053 | ERAP2_114 | AAACATCTGTTGGTATACTGT |
| 1054 | ERAP2_115 | TGCTTGATATTACAGTATACC |
| 1055 | ERAP2_116 | AAGATTGTGTATTCTGTGGGT |
| 1056 | ERAP2_117 | TTCAGCACTTGACATTGACAG |
| 1057 | ERAP2_118 | GAGCAATATGAACTGTCAATG |
| 1058 | ERAP2_119 | TTTTGTTCAGCACTTGACATT |
| 1059 | ERAP2_120 | CTGATGCTTGCTCGTTGACAA |
| 1060 | ERAP2_121 | TCAACGAGCAAGCATCAGGAA |
| 1061 | ERAP2_122 | GAAACAAATTATTTTTCTTTC |
| 1062 | ERAP2_123 | CTTCCATTCCTAGTTCAATTA |
| 1063 | ERAP2_124 | TTTCTTCAGGTTAATTGAACT |
| 1064 | ERAP2_125 | TTCAGGTTAATTGAACTAGGA |
| 1065 | ERAP2_126 | GACGTCTGGCAATCGCATGAA |
| 1066 | ERAP2_127 | TCTTACAAAATCCCATGCTAG |
| 1067 | ERAP2_128 | AGAAGATGGGTCCAATTTTCT |
| 1068 | ERAP2_129 | TAAGAGAAAATTGGACCCATC |
| 1069 | ERAP2_130 | TATGGTGTTTCTTTTTATTTT |
| 1070 | ERAP2_131 | TTTTTATTTTCAGATTTGACT |
| 1071 | ERAP2_132 | TTTTCAGATTTGACTTGGGCT |
| 1072 | ERAP2_133 | AGATTTGACTTGGGCTCATAT |
| 1073 | ERAP2_134 | ACTTGGGCTCATATGACATAA |
| 1074 | ERAP2_135 | TTCCAAGGATAAGTTGCAAGA |
| 1075 | ERAP2_136 | ACCTGTAAAATATTGAAGAAA |
| 1076 | ERAP2_137 | TTCAATATTTTACAGGTGAAA |
| 1077 | ERAP2_138 | CAGGTGAAACTATTTTTTGAA |
| 1078 | ERAP2_139 | AATCTCTTGAGGCTCAAGGAT |
| 1079 | ERAP2_140 | AAAAATATCCAGATGTGATCC |
| 1080 | ERAP2_141 | CAGAACAGTTTGAAAAATATC |
| 1081 | ERAP2_142 | GTTATCGTTTCCAGAACAGTT |
| 1082 | ERAP2_143 | TATTTTTGGTTATCGTTTCCA |
| 1083 | ERAP2_144 | AAACTGTTCTGGAAACGATAA |
| 1084 | ERAP2_145 | AGTATTAACCATTAGCCAAGT |
| 1085 | ERAP2_146 | TATTGACCATTTAAGTATTAA |
| 1086 | ERAP2_147 | ggaggctgagaagggcggatc |
| 1087 | ERAP2_148 | gcggagacggggtctcaccgt |
| 1088 | ERAP2_149 | tatttttagcggagacggggt |
| 1089 | ERAP2_150 | ctgctgcagcctgccgagtag |
| 1090 | ERAP2_151 | tgccattttcctgctgcagcc |
| 1091 | ERAP2_152 | agacagagtctcgctcagtca |
| 1092 | ERAP2_153 | ACTTCATGCAGGCAGTCATGT |
| 1093 | ERAP2_154 | TTGAGACTTCTTGTTGGTTAG |
| 1094 | ERAP2_155 | TCTAACCAACAAGAAGTCTCA |
| 1095 | ERAP2_156 | GCTGGATACGATAGCTGAGAG |
| 1096 | ERAP2_157 | AATAGGATACTGAACTGGCCT |
| 1097 | ERAP2_158 | CTTTTAAATAGGATACTGAAC |
| 1098 | ERAP2_159 | AAAGTAAACTTCCTGAATAAT |
| 1099 | ERAP2_160 | GCCTCAAGTGACTTTCTCCAT |
| 1100 | ERAP2_161 | TCCATTGCTTCACGCTATGCC |
| 1101 | ERAP2_162 | CTTCTTTAATTTTTTTAACCT |
| 1102 | ERAP2_163 | ATTTTTTTAACCTTGCTTAGT |
| 1103 | ERAP2_164 | ACCTTGCTTAGTATTCTATAG |
| 1104 | ERAP2_165 | CTTGGACGTAAAACTGGTTGG |
| 1105 | ERAP2_166 | CCCAACCAGTTTTACGTCCAA |
| 1106 | ERAP2_167 | TGCATTGGCTAATTTTCCTTG |
| 1107 | ERAP2_168 | tataTTTTATGCATTGGCTAA |
| 1108 | ERAP2_169 | CGTCCAAGGAAAATTAGCCAA |
| 1109 | ERAP2_170 | atagtttgtataTTTTATGCA |
| 1110 | ERAP2_171 | ctgatccttgcctttcatagt |
| 1111 | ERAP2_172 | gtggcaaagtctctggtttcc |
| 1112 | ERAP2_173 | taataatctgagatttggtgg |
| 1113 | ERAP2_174 | ccaccaaatctcagattatta |
| 1114 | ERAP2_175 | tcaagaaggccaggaaggcct |
| 1115 | ERAP2_176 | ggttaagccttacattcatga |
| 1116 | ERAP2_177 | gaatgctctcaaaaatctacc |
| 1117 | ERAP2_178 | accaGAGACCATtcatttgga |
| 1118 | ERAP2_179 | agagcattccaaatgaATGGT |
| 1119 | ERAP2_180 | accattcattcatttgaccaG |
| 1120 | ERAP2_181 | ttcatttgaccattcattcat |
| 1121 | ERAP2_182 | TATCTCTGTGAGGGCAGattt |
| 1122 | ERAP2_183 | CTTTTGTATCTCTGTGAGGGC |
| 1123 | ERAP2_184 | gtttaagccttacattcatga |
| 1124 | ERAP2_185 | agccttacattcatgaagtac |
| 1125 | ERAP2_186 | gaatgatctcaaaaatctacc |
| 1126 | ERAP2_187 | agatcattccaaatgaagtcg |
| 1127 | ERAP2_188 | Ttgtgtctctgtgagggcaga |
| 1128 | ERAP2_189 | TTAAAAATGCAATAGTGTATG |
| 1129 | ERAP2_190 | aaaagatTTATTAAAAATGCA |
| 1130 | ERAP2_191 | ATAAatcttttgaaatttgca |
| 1131 | ERAP2_192 | accgaaaatacacaatacaat |
| 1132 | ERAP2_193 | aaatttgcagaattagattgt |
| 1133 | ERAP2_194 | cagaattagattgtattgtgt |
| 1134 | ERAP2_195 | cattcaattatcatttaaccg |
| 1135 | ERAP2_196 | ggttaaatgataattgaatgt |
| 1136 | ERAP2_197 | gatgcagcaccatattttata |
| 1137 | ERAP2_198 | Cttaaaatatgaagaaatgct |
| 1138 | ERAP2_199 | taacccagctttagcatttct |
| 1139 | ERAP2_200 | gcatttcttcatattttaaGG |
| 1140 | ERAP2_201 | ttcatattttaaGGAAACCCC |
| 1141 | ERAP2_202 | aGGAAACCCCCCACCTCCTTC |
| 1142 | ERAP2_203 | AGAGAGCAAGAAGCGCCCTTA |
| 1143 | ERAP2_204 | GCAGGGCATTTCAGAGAGCAA |
| 1144 | ERAP2_205 | AGGGCGCTTCTTGCTCTCTGA |
| 1145 | ERAP2_206 | ttccaaactaccttattcaaa |
| 1146 | ERAP2_207 | tttattccaaactaccttatt |
| 1147 | ERAP2_208 | tttctttattccaaactacct |
| 1148 | ERAP2_209 | aataaggtagtttggaataaa |
| 1149 | ERAP2_210 | ctatctgtatgtagagtgatc |
| 1150 | ERAP2_211 | gaataaagaaagaaaagatca |
| 1151 | ERAP2_212 | tactgtctcatatataggatc |
| 1152 | ERAP2_213 | tgatcctatatatgagacagt |
| 1153 | ERAP2_214 | taaaacttatctgtattttta |
| 1154 | ERAP2_215 | agtctttctaaaacttatctg |
| 1155 | ERAP2_216 | catattgttttgagtctttct |
| 1156 | ERAP2_217 | gaaagactcaaaacaatatgt |
| 1157 | ERAP2_218 | cattattaaggaagacttggg |
| 1158 | ERAP2_219 | CCCTCTTGACCCaacatccca |
| 1159 | ERAP2_220 | GAGCAATATCATGAAGGTCAA |
| 1160 | ERAP2_221 | TTTGATGCCACAGTCAGAGAT |
| 1161 | ERAP2_222 | ATGCCACAGTCAGAGATAGAA |
| 1162 | ERAP2_223 | GGTGGCCATGGATGTGCCCCA |
| 1163 | ERAP2_224 | ACCAAAAAATGTGTACTGTAT |
| 1164 | ERAP2_225 | GTTAAATTTGTTTTCAGATCA |
| 1165 | ERAP2_226 | TTTTCAGATCATTTCATGGAA |
| 1166 | ERAP2_227 | AGATCATTTCATGGAATCTTT |
| 1167 | ERAP2_228 | ATGGAATCTTTGAAGTATCTT |
| 1168 | ERAP2_229 | AAGTATCTTTGACTCTAACTT |
| 1169 | ERAP2_230 | ACTCTAACTTTGACTTGGTGG |
| 1170 | ERAP2_231 | ACTTGGTGGTGGACCTTCCTT |
| 1171 | ERAP2_232 | TAACACCTAAGAGATATCCTT |
| 1172 | ERAP2_233 | CTTATGCTAAAATACATGTAA |
| 1173 | ERAP2_234 | AATTTCCTTATGCTAAAATAC |
| 1174 | ERAP2_235 | CTTTTTCAATTTCCTTATGCT |
| 1175 | ERAP2_236 | GAATTACATGTATTTTAGCAT |
| 1176 | ERAP2_237 | GCATAAGGAAATTGAAAAAGT |
| 1177 | ERAP2_238 | CATATGGTCTTGTTGAAAAAA |
| 1178 | ERAP2_239 | ATTTACATATGGTCTTGTTGA |
| 1179 | ERAP2_240 | ACTATTTAATTTACATATGGT |
| 1180 | ERAP2_241 | AACAAGACCATATGTAAATTA |
| 1181 | ERAP2_242 | TGGAAACATTGTTGATGGTAC |
| 1182 | ERAP2_243 | AGTAGAACTGTACCATCAACA |
| 1183 | ERAP2_244 | CATAAATATGCAGAGTTCTTT |
| 1184 | ERAP2_245 | ACAATATTGTAAATAACAATA |
| 1185 | ERAP2_246 | TTTTGTATTGTTATTTACAAT |
| 1186 | ERAP2_247 | TATTGTTATTTACAATATTGT |
| 1187 | ERAP2_248 | CAATATTGTTAAATTGAATGC |
| 1188 | ERAP2_249 | GAATCCTAGAAATTGCAAATG |
| 1189 | ERAP2_250 | TGTACTCAATTCTTTAGAATC |
| 1190 | ERAP2_251 | CAATTTCTAGGATTCTAAAGA |
| 1191 | ERAP2_252 | TAGGATTCTAAAGAATTGAGT |
| 1192 | ERAP2_253 | TTATTTGATGATAATATGAGA |
| 1193 | ERAP2_254 | ATGATAATATGAGAATTACTG |
| 1194 | ERAP2_255 | TCAAAACAGTATTGGCACAGT |
| 1195 | ERAP2_256 | TTTATCAAAACAGTATTGGCA |
| 1196 | ERAP2_257 | AAAATCTATTTATTTATCAAA |
| 1197 | ERAP2_258 | TTTTTAAAAATCTATTTATTT |
| 1198 | ERAP2_259 | ATAAATAAATAGATTTTTAAA |
| 1199 | ERAP2_260 | AAAATAAATGTATTGTACTTA |
| 1200 | ERAP2_261 | TCCTTACCATGTTACTTGTCA |
| 1201 | STAT1_001 | CCTATAGGATGTCTCAGTGGT |
| 1202 | STAT1_002 | AGTCAAGCTGCTGAAGTTCGT |
| 1203 | STAT1_003 | CATGGGAAAACTGTCATCATA |
| 1204 | STAT1_004 | TGATGACAGTTTTCCCATGGA |
| 1205 | STAT1_005 | TAACCACTGTGCCAGGTACTG |
| 1206 | STAT1_006 | CCATGGAAATCAGACAGTACC |
| 1207 | STAT1_007 | ATTTGCCACCATCCGTTTTCA |
| 1208 | STAT1_008 | CCACCATCCGTTTTCATGACC |
| 1209 | STAT1_009 | ATGACCTCCTGTCACAGCTGG |
| 1210 | STAT1_010 | CTTATGTTATGCTGTAGCAAG |
| 1211 | STAT1_011 | TTTGGAGAATAACTTCTTGCT |
| 1212 | STAT1_012 | GAGAATAACTTCTTGCTACAG |
| 1213 | STAT1_013 | TTCTAACCACTCAAATCTAGG |
| 1214 | STAT1_014 | AGGAAGACCCAATCCAGATGT |
| 1215 | STAT1_015 | TTCCTTCAGACAGCTGTAAAT |
| 1216 | STAT1_016 | CTTTCTTCCTTCAGACAGCTG |
| 1217 | STAT1_017 | CAGAATTTTCCTTTCTTCCTT |
| 1218 | STAT1_018 | CAGCTGTCTGAAGGAAGAAAG |
| 1219 | STAT1_019 | TCTAACATCACTGTGCTCTGA |
| 1220 | STAT1_020 | TGTTTGTCTAACATCACTGTG |
| 1221 | STAT1_021 | CTGTCAAGCTCTTTCTGTTTG |
| 1222 | STAT1_022 | TGACTTTACTGTCAAGCTCTT |
| 1223 | STAT1_023 | ATGCTCTATACACTACAAACA |
| 1224 | STAT1_024 | CATCTTTGTTTGTAGTGTATA |
| 1225 | STAT1_025 | TTTGTAGTGTATAGAGCATGA |
| 1226 | STAT1_026 | TAGTGTATAGAGCATGAAATC |
| 1227 | STAT1_027 | AAGTCATATTCATCTTGTAAA |
| 1228 | STAT1_028 | CATTTGAAGTCATATTCATCT |
| 1229 | STAT1_029 | CAAGATGAATATGACTTCAAA |
| 1230 | STAT1_030 | CTGGCTGTCTCTCAATTTATA |
| 1231 | STAT1_031 | CCACACCATTGGTCTCGTGTT |
| 1232 | STAT1_032 | TGATCACTCTTTGCCACACCA |
| 1233 | STAT1_033 | TAGAACACGAGACCAATGGTG |
| 1234 | STAT1_034 | TCTTATTGTCAAGCATTAAAT |
| 1235 | STAT1_035 | ATGCTTGACAATAAGAGAAAG |
| 1236 | STAT1_036 | TGAACTACTTCCTAAAGGCAA |
| 1237 | STAT1_037 | ACTTTGTTTCTTCTATTGCCT |
| 1238 | STAT1_038 | TTTCTTCTATTGCCTTTAGGA |
| 1239 | STAT1_039 | TTCTATTGCCTTTAGGAAGTA |
| 1240 | STAT1_040 | GGAAGTAGTTCACAAAATAAT |
| 1241 | STAT1_041 | AGCTGCTGCCGAACTTGCTGC |
| 1242 | STAT1_042 | TGTTCCAATTCCTCCAACTTT |
| 1243 | STAT1_043 | TGATAGGGTCATGTTCGTAGG |
| 1244 | STAT1_044 | TTTTTTGTGATAGGGTCATGT |
| 1245 | STAT1_045 | CACCACAAACGAGCTGCAAAT |
| 1246 | STAT1_046 | CTGGGTATTTGCAGCTCGTTT |
| 1247 | STAT1_047 | CAGCTCGTTTGTGGTGGAAAG |
| 1248 | STAT1_048 | TGGTGGAAAGACAGCCCTGCA |
| 1249 | STAT1_049 | ACCAACAGTCTGGaaagaaaa |
| 1250 | STAT1_050 | tttttctttCCAGACTGTTGG |
| 1251 | STAT1_051 | tttCCAGACTGTTGGTGAAAT |
| 1252 | STAT1_052 | CAGACTGTTGGTGAAATTGCA |
| 1253 | STAT1_053 | AAATTATAATTCAGCTCTTGC |
| 1254 | STAT1_054 | ACTTTCAAATTATAATTCAGC |
| 1255 | STAT1_055 | AAAGTCAAAGTCTTATTTGAT |
| 1256 | STAT1_056 | TCTCATTCACATCTCTGCaaa |
| 1257 | STAT1_057 | CTGTATTTCTCTCATTCACAT |
| 1258 | STAT1_058 | CAGAGATGTGAATGAGAGAAA |
| 1259 | STAT1_059 | AGCATTTCTTTCCTATATTGT |
| 1260 | STAT1_060 | TTTCCTATATTGTATAGATTT |
| 1261 | STAT1_061 | CTATATTGTATAGATTTAGGA |
| 1262 | STAT1_062 | TGTGCGTGCCCAAAATGTTGA |
| 1263 | STAT1_063 | GGAAGTTCAACATTTTGGGCA |
| 1264 | STAT1_064 | GGCACGCACACAAAAGTGATG |
| 1265 | STAT1_065 | AATTGCTATAAAACAAATAAT |
| 1266 | STAT1_066 | CTAAGATGATTATTTGTTTTA |
| 1267 | STAT1_067 | TGTTCTTTCAATTGCTATAAA |
| 1268 | STAT1_068 | TTTTATAGCAATTGAAAGAAC |
| 1269 | STAT1_069 | TAGCAATTGAAAGAACAGAAA |
| 1270 | STAT1_070 | TTCTTTCCTTTTCTCTTCCAA |
| 1271 | STAT1_071 | CTTTTCTCTTCCAAGGGTCCT |
| 1272 | STAT1_072 | TCTTCCAAGGGTCCTCTCATC |
| 1273 | STAT1_073 | AAAACTAAGGGAGTGAAGCTC |
| 1274 | STAT1_074 | AAACCCAATTGTGCCAGCCTG |
| 1275 | STAT1_075 | AAGGTCTTTGTCATCCTTTAG |
| 1276 | STAT1_076 | TCATCCTTTAGACGACCTCTC |
| 1277 | STAT1_077 | GACGACCTCTCTGCCCGTTGT |
| 1278 | STAT1_078 | GTACAACATGCTGGTGGCGGA |
| 1279 | STAT1_079 | GGTGTTTTCTCTCTAGAATCT |
| 1280 | STAT1_080 | TCTCTAGAATCTGTCCTTCTT |
| 1281 | STAT1_081 | GTGACAGAAGAAAACTGCCAA |
| 1282 | STAT1_082 | AGAAGTGCTGAGTTGGCAGTT |
| 1283 | STAT1_083 | TTCTGTCACCAAAAGAGGTCT |
| 1284 | STAT1_084 | TTTGTTTAGGTCCTAACGCCA |
| 1285 | STAT1_085 | TTTAGGTCCTAACGCCAGCCC |
| 1286 | STAT1_086 | GGTCCTAACGCCAGCCCCGAT |
| 1287 | STAT1_087 | CTGAAAGTATACAAATGCAGA |
| 1288 | STAT1_088 | TATTTTCCTGAAAGTATACAA |
| 1289 | STAT1_089 | TCATTTATATTTTCCTGAAAG |
| 1290 | STAT1_090 | TATACTTTCAGGAAAATATAA |
| 1291 | STAT1_091 | AGGAAAATATAAATGATAAAA |
| 1292 | STAT1_092 | AATCCAAAGCCAGAAGGGAAA |
| 1293 | STAT1_093 | ATGAGTTCTAGGATGCTTTCA |
| 1294 | STAT1_094 | CCTTCTGGCTTTGGATTGAAA |
| 1295 | STAT1_095 | GATTGAAAGCATCCTAGAACT |
| 1296 | STAT1_096 | CTTAGCTTTTCTCCTTTTTAG |
| 1297 | STAT1_097 | TCCTTTTTAGAACCTGACTTC |
| 1298 | STAT1_098 | TTCGTGTAGGGTTCAACCGCA |
| 1299 | STAT1_099 | GAACCTGACTTCCATGCGGTT |
| 1300 | STAT1_100 | TAATTGCGAATGATGTCAGGG |
| 1301 | STAT1_101 | TGCTGTTACTTTCCCTGACAT |
| 1302 | STAT1_102 | CCTGACATCATTCGCAATTAC |
| 1303 | STAT1_103 | GATACAGATACTTCAGGGGAT |
| 1304 | STAT1_104 | TCAATATTTGGATACAGATAC |
| 1305 | STAT1_105 | CAAAGGCATGGTCTTTGTCAA |
| 1306 | STAT1_106 | GCCTGGAGTAATACTTTCCAA |
| 1307 | STAT1_107 | GAAAGTATTACTCCAGGCCAA |
| 1308 | STAT1_108 | GGGCCATCAAGTTCCATTGGC |
| 1309 | STAT1_109 | TTTCTAGCACCAGAGCCAATG |
| 1310 | STAT1_110 | TAGCACCAGAGCCAATGGAAC |
| 1311 | STAT1_111 | TTTTTCCCCATTTTAGTCACC |
| 1312 | STAT1_112 | CCCATTTTAGTCACCCTTCTA |
| 1313 | STAT1_113 | GTCACCCTTCTAGACTTCAGA |
| 1314 | STAT1_114 | ACGAGGTGTCTCGGATAGTGG |
| 1315 | STAT1_115 | TCTTTTTACAGATGAACACAG |
| 1316 | TWF1_001 | ACATCTTCACTTGCTGTGGAA |
| 1317 | TWF1_002 | CTTTCTTTATCTTTTTCCACA |
| 1318 | TWF1_003 | TTTATCTTTTTCCACAGCAAG |
| 1319 | TWF1_004 | TCTTTTTCCACAGCAAGTGAA |
| 1320 | TWF1_005 | CACAGCAAGTGAAGATGTTAA |
| 1321 | TWF1_006 | TGGCTCTGGCAAAGATCTCTT |
| 1322 | TWF1_007 | CATTTCTGGCTCTGGCAAAGA |
| 1323 | TWF1_008 | AGAAGTCTGTACTTTCCATTT |
| 1324 | TWF1_009 | CCAGAGCCAGAAATGGAAAGT |
| 1325 | TWF1_010 | AATAGATATTTTCAGAAGTCT |
| 1326 | TWF1_011 | TAAAAATAATTTTTCATAGAG |
| 1327 | TWF1_012 | ATAGAGCAACTTGTGATTGGA |
| 1328 | TWF1_013 | TCCTCCAACAGGGGTAAAACA |
| 1329 | TWF1_014 | TTTTACCCCTGTTGGAGGACA |
| 1330 | TWF1_015 | CCCCTGTTGGAGGACAAACAA |
| 1331 | TWF1_016 | ACGAACCTATTCAGTTGTGAA |
| 1332 | TWF1_017 | ACAACTGAATAGGTTCGTCAA |
| 1333 | TWF1_018 | ATGTGGCCACCTCCAAATTCC |
| 1334 | TWF1_019 | CTGTTCCAAATACTTCATCTT |
| 1335 | TWF1_020 | GAGGTGGCCACATTAAAGATG |
| 1336 | TWF1_021 | TATCCATGTAATGATACATCT |
| 1337 | TWF1_022 | ATCTGTCGTAGTTCTTCCTCA |
| 1338 | TWF1_023 | ATGCTTAGTGTCCACACCCAC |
| 1339 | TWF1_024 | CAAAGCCTGAAAGGCTTCTCG |
| 1340 | TWF1_025 | CCATTTCTCGAGAAGCCTTTC |
| 1341 | TWF1_026 | TCGAGAAGCCTTTCAGGCTTT |
| 1342 | TWF1_027 | AGGCTTTGGAAAAATTGAATA |
| 1343 | TWF1_028 | GAAAAATTGAATAATAGACAG |
| 1344 | TWF1_029 | CTGCCAATAAGAAACAAAATA |
| 1345 | TWF1_030 | TATCTATTTCCTGCCAATAAG |
| 1346 | TWF1_031 | ATTTTTTATATCTATTTCCTG |
| 1347 | TWF1_032 | TTTCTTATTGGCAGGAAATAG |
| 1348 | TWF1_033 | TTATTGGCAGGAAATAGATAT |
| 1349 | TWF1_034 | TTGTGTTGGCCAAAATTATAA |
| 1350 | TWF1_035 | AGTTCTGTATTTGTTGTGTTG |
| 1351 | TWF1_036 | GCAAATCTTTCAGTTCTGTAT |
| 1352 | TWF1_037 | GCCAACACAACAAATACAGAA |
| 1353 | TWF1_038 | CCAAAGAGGATTCCCAAGGAT |
| 1354 | TWF1_039 | TACAGAAAGAAATGGTAACGA |
| 1355 | TWF1_040 | TTTCTGTATAAACATTCCCAT |
| 1356 | TWF1_041 | TGTATAAACATTCCCATGAAG |
| 1357 | TWF1_042 | TTATTATTTGAACTTACAGTT |
| 1358 | TWF1_043 | AACTTACAGTTTTTATTTATT |
| 1359 | TWF1_044 | TTTATTCAATGCCTGGATACA |
| 1360 | TWF1_045 | TTCAATGCCTGGATACACATG |
| 1361 | TWF1_046 | TAGCAGACGGCTCTTGCAGCT |
| 1362 | TWF1_047 | TACAATTTCTAGCAGACGGCT |
| 1363 | TWF1_048 | TAGTTGTCTTTCTACAATTTC |
| 1364 | TWF1_049 | TAATTACATCCATTTGTAGTT |
| 1365 | TWF1_050 | TCTTTTACAGATCGAGATAGA |
| 1366 | TWF1_051 | CAGATCGAGATAGACAATGGG |
| 1367 | TWF1_052 | CTTGTGTGCATGCTGCTTGGG |
| 1368 | TWF1_053 | TGAAGAAGTACATCCCAAGCA |
| 1369 | TWF1_054 | CAAAACTTTGCTTGTGTGCAT |
| 1370 | TWF1_055 | GTTTTGCAAAACTTTGCTTGT |
| 1371 | TWF1_056 | CTGCAGGACCTTTTGGTTTTG |
| 1372 | TWF1_057 | CAAAACCAAAAGGTCCTGCAG |
| 1373 | TWF1_058 | CGCTGGGCCCCTAATTAGTCT |
| 1374 | TWF1_059 | ATCAGTAGTAGCTTCAGTTTC |
| 1375 | TWF1_060 | ATGTGATGACTTTAATCAGTA |
| 1376 | TWF1_061 | AAAAACTAGTATTACAATGTT |
| 1377 | TWF1_062 | AGTTCTCCTGTACTAAAAGCT |
| 1378 | TWF1_063 | AAAGTCCAGCTTTTAGTACAG |
| 1379 | TWF1_064 | TATCAACATGGAATGATTTCA |
| 1380 | TWF1_065 | GTACAGGAGAACTGAAATCAT |
| 1381 | TWF1_066 | CCTACTTTATATCAACATGGA |
| 1382 | TWF1_067 | CAAAAAGTACAATTTTTTTCC |
| 1383 | TWF1_068 | AAAACACACAGAAGTGAAAAG |
| 1384 | TWF1_069 | GAAAATAGCACTTTTCACTTC |
| 1385 | TWF1_070 | ACTTCTGTGTGTTTTTAAAAT |
| 1386 | TWF1_071 | AAATTAATGTTATAGAAGACT |
| 1387 | TWF1_072 | ACTCAAAAATAGAAATCATGA |
| 1388 | TWF1_073 | TAGCTTTAACTCAAAAATAGA |
| 1389 | TWF1_074 | TATTTTTGAGTTAAAGCTAGA |
| 1390 | TWF1_075 | AGTTAAAGCTAGAAAAGGGTT |
| 1391 | TWF1_076 | ATTTTGTCACACTGTTTTCAT |
| 1392 | TWF1_077 | AAGTGTGGAATCAACGCTATG |
| 1393 | TWF1_078 | TCACACTGTTTTCATAGCGTT |
| 1394 | TWF1_079 | AGAAGTATTTGAAGTGTGGAA |
| 1395 | TWF1_080 | ATAGCGTTGATTCCACACTTC |
| 1396 | TWF1_081 | TAGAACTGGCCCAACTGTATA |
| 1397 | TWF1_082 | AGACATCAGACTTTCTAGAAC |
| 1398 | TWF1_083 | TACAGTTGGGCCAGTTCTAGA |
| 1399 | TWF1_084 | CCCTTTGAGACATCAGACTTT |
| 1400 | TWF1_085 | TGTCCCACAAGAAAGTAGTAA |
| 1401 | TWF1_086 | AGGTCTTTCTGTCCCACAAGA |
| 1402 | TWF1_087 | TTGTGGGACAGAAAGACCTTA |
| 1403 | TWF1_088 | CAGCTTAGAAAATACTCTAGC |
| 1404 | TWF1_089 | CAAGGCACACTAAGTTTCCAG |
| 1405 | TWF1_090 | TAAGCTGGAAACTTAGTGTGC |
| 1406 | TWF1_091 | TAAAAGTTGCAGACATGATCC |
| 1407 | TWF1_092 | GAAATAGTGCTTTATATTGCA |
| 1408 | TWF1_093 | TATTGCAGCAGTCTTTTATAT |
| 1409 | TWF1_094 | ATGCTATTaaaaaaaaGTCAA |
| 1410 | TWF1_095 | TATTTGACttttttttAATAG |
| 1411 | TWF1_096 | ACttttttttAATAGCATTAA |
| 1412 | TWF1_097 | AGAGTGAGCTGATCTGCAATT |
| 1413 | TWF1_098 | ATAGCATTAAAATTGCAGATC |
| 1414 | TWF1_099 | AGGGTACCAGATATTTTCTAT |
| 1415 | TWF1_100 | AATGTCATCAGAAATCCTGCA |
| 1416 | TWF1_101 | AAATAGGTGGGCTACCTTTCT |
| 1417 | ERAP1_001 | AGGGGCAGAAACACCATCTTC |
| 1418 | ERAP1_002 | TGCCCCTCAAATGGTCCCTTG |
| 1419 | ERAP1_003 | TACTTTCCTCACTGTTGGCTC |
| 1420 | ERAP1_004 | CTCACTGTTGGCTCTCTTAAC |
| 1421 | ERAP1_005 | GAGATGCTTCAGTGCTCTGAC |
| 1422 | ERAP1_006 | TTCCAAGGAAATGGTGTCCCA |
| 1423 | ERAP1_007 | CTTGGAATAAAATACGACTTC |
| 1424 | ERAP1_008 | CATGGATCAAGAGATCATAAT |
| 1425 | ERAP1_009 | GTGGTTCCCCAGAAGGTCAGC |
| 1426 | ERAP1_010 | TACTTTCGTGGTTCCCCAGAA |
| 1427 | ERAP1_011 | CTCCTGACGGGGGTGTTCCAG |
| 1428 | ERAP1_012 | TAAAATCCGTGGAAAGTCTCC |
| 1429 | ERAP1_013 | GGAGACTTTCCACGGATTTTA |
| 1430 | ERAP1_014 | CACGGATTTTACAAAAGCACC |
| 1431 | ERAP1_015 | CAAAAGCACCTACAGAACCAA |
| 1432 | ERAP1_016 | TTTCACTTGCCTTAATTTTAG |
| 1433 | ERAP1_017 | ACTTGCCTTAATTTTAGGATA |
| 1434 | ERAP1_018 | GGATACTAGCATCAACACAAT |
| 1435 | ERAP1_019 | AACCCACTGCAGCTAGAATGG |
| 1436 | ERAP1_020 | AAGGCAGGTTCATCAAAGCAG |
| 1437 | ERAP1_021 | CCTGCTTTGATGAACCTGCCT |
| 1438 | ERAP1_022 | ATTGAGAAACTTGCTTTGAAG |
| 1439 | ERAP1_023 | ATGAACCTGCCTTCAAAGCAA |
| 1440 | ERAP1_024 | TCAATCAAAATTAGAAGAGAG |
| 1441 | ERAP1_025 | AATTATTCTGATTTTAGGTGA |
| 1442 | ERAP1_026 | GGTGAAATCTGTGACTGTTGC |
| 1443 | ERAP1_027 | ATGTCACTGTGAAGATGAGCA |
| 1444 | ERAP1_028 | AGATTTTGAGTCTGTCAGCAA |
| 1445 | ERAP1_029 | AGTCTGTCAGCAAGATAACCA |
| 1446 | ERAP1_030 | TCTTGTCTGGCACAGCATAAA |
| 1447 | ERAP1_031 | TCTTTAGGTTTCTGTTTATGC |
| 1448 | ERAP1_032 | GGTTTCTGTTTATGCTGTGCC |
| 1449 | ERAP1_033 | TGTTTATGCTGTGCCAGACAA |
| 1450 | ERAP1_034 | TGCTGTGCCAGACAAGATAAA |
| 1451 | ERAP1_035 | GGTAGGGGATACGGTATGCTG |
| 1452 | ERAP1_036 | TGAGGATTATTTCAGCATACC |
| 1453 | ERAP1_037 | AGCATACCGTATCCCCTACCC |
| 1454 | ERAP1_038 | TTACTTCCTTCCCAAGATCTT |
| 1455 | ERAP1_039 | CATAGCACCAGACTGAAAGTC |
| 1456 | ERAP1_040 | AGTCTGGTGCTATGGAAAACT |
| 1457 | ERAP1_041 | TGCATCAAACAACAGAGCAGA |
| 1458 | ERAP1_042 | ATGCAGAAAAGTCTTCTGCAT |
| 1459 | ERAP1_043 | GTGGTTTGGGAACCTGGTCAC |
| 1460 | ERAP1_044 | GGAACCTGGTCACTATGGAAT |
| 1461 | ERAP1_045 | GCCAAAGATCATTCCACCATT |
| 1462 | ERAP1_046 | GCAAATCCTTCATTTAGCCAA |
| 1463 | ERAP1_047 | GCTAAATGAAGGATTTGCCAA |
| 1464 | ERAP1_048 | CCAAATTTATGGAGTTTGTGT |
| 1465 | ERAP1_049 | AGTTCAGGATGGGTCACACTG |
| 1466 | ERAP1_050 | TGGAGTTTGTGTCTGTCAGTG |
| 1467 | ERAP1_051 | TGTCTGTCAGTGTGACCCATC |
| 1468 | ERAP1_052 | CCAAAGAAATAATCTCCCTAT |
| 1469 | ERAP1_053 | TTTTTTCTATCTCAATAGGGA |
| 1470 | ERAP1_054 | TATCTCAATAGGGAGATTATT |
| 1471 | ERAP1_055 | AAGCATCTACCTCCATTGCGT |
| 1472 | ERAP1_056 | TTTGGCAAATGTTTTGACGCA |
| 1473 | ERAP1_057 | GCAAATGTTTTGACGCAATGG |
| 1474 | ERAP1_058 | ACGCAATGGAGGTAGATGCTT |
| 1475 | ERAP1_059 | CACAGGTGTAGACACAGGGTG |
| 1476 | ERAP1_060 | AATTCCTCACACCCTGTGTCT |
| 1477 | ERAP1_061 | CCTTATCATAAGAAACATCAT |
| 1478 | ERAP1_062 | ATGATGTTTCTTATGATAAGG |
| 1479 | ERAP1_063 | TATTATCTTTTCAGGGAGCTT |
| 1480 | ERAP1_064 | AGGGAGCTTGTATTCTGAATA |
| 1481 | ERAP1_065 | AATGCGTCAGCACTAAGATAC |
| 1482 | ERAP1_066 | TAGCTATGCTTCTGGAGATAC |
| 1483 | ERAP1_067 | AAAGTGGTATTGTACAGTATC |
| 1484 | ERAP1_068 | TATTTTTATAGCTATGCTTCT |
| 1485 | ERAP1_069 | CACCATCTGTAGGGCAAATCT |
| 1486 | ERAP1_070 | TTTTTGGTTTTTAGATTTGCC |
| 1487 | ERAP1_071 | GTTTTTAGATTTGCCCTACAG |
| 1488 | ERAP1_072 | GATTTGCCCTACAGATGGTGT |
| 1489 | ERAP1_073 | CCCTACAGATGGTGTAAAAGG |
| 1490 | ERAP1_074 | CTCTAGAAGTCAACATTCATC |
| 1491 | ERAP1_075 | TGTACACACCAGCATTGGCAT |
| 1492 | ERAP1_076 | ACATCCACCCCTTCCTGATGC |
| 1493 | ERAP1_077 | CCCTAATAACCATCACAGTGA |
| 1494 | ERAP1_078 | CTCTAGGAGCATTACCCAGTG |
| 1495 | ERAP1_079 | TTTTAGGTACCTGTGGCATGT |
| 1496 | ERAP1_080 | CTGGTGATGAATGTCAATGGA |
| 1497 | ERAP1_081 | GGTACCTGTGGCATGTTCCAT |
| 1498 | ERAP1_082 | GCAAAAATCGATGGACCATGT |
| 1499 | ERAP1_083 | TTTTTAGCAAAAATCGATGGA |
| 1500 | ERAP1_084 | CAAAATAAATTACCTGTTTTT |
| 1501 | ERAP1_085 | ATTTATTTTATTTACTCTAGA |
| 1502 | ERAP1_086 | TTTTATTTACTCTAGATGTGC |
| 1503 | ERAP1_087 | TTTACTCTAGATGTGCTCATC |
| 1504 | ERAP1_088 | CTCTAGATGTGCTCATCCTCC |
| 1505 | ERAP1_089 | ATCCATTCCACCTCTTCTGGG |
| 1506 | ERAP1_090 | ATGTGGGCATGAATGGCTATT |
| 1507 | ERAP1_091 | AAAGGCCAGTCAAAGAGTCCC |
| 1508 | ERAP1_092 | ACTGGCCTTTTAAAAGGAACA |
| 1509 | ERAP1_093 | AAAGGAACACACACAGCAGTC |
| 1510 | ERAP1_094 | TGCAGCGTGTATTACCTGACG |
| 1511 | ERAP1_095 | AAGTACAGGGATAAATCCAAG |
| 1512 | ERAP1_096 | ATGTTTCAAGTACAGGGATAA |
| 1513 | ERAP1_097 | AGTTTCATGTTTCAAGTACAG |
| 1514 | ERAP1_098 | TCCCTGTACTTGAAACATGAA |
| 1515 | ERAP1_099 | AAGGTTTGAATGAGCTGATTC |
| 1516 | ERAP1_100 | TCCATTAACTTATACATAGGA |
| 1517 | ERAP1_101 | AATGAGCTGATTCCTATGTAT |
| 1518 | ERAP1_102 | CACTTCATTCATATCTCTTTT |
| 1519 | ERAP1_103 | CCTTGAATTGAGTTTCCACTT |
| 1520 | ERAP1_104 | AGGCTTTTACCTTGAATTGAG |
| 1521 | ERAP1_105 | TTTCAGGCTTTTACCTTGAAT |
| 1522 | ERAP1_106 | CCTGTACAACGCCCTCAGGCC |
| 1523 | ERAP1_107 | TGAAATAGCCTTCTGCCCTCT |
| 1524 | ERAP1_108 | CATTGGATTCCTTCCACTTTC |
| 1525 | ERAP1_109 | AGAAAGTGGAAGGAATCCAAT |
| 1526 | ERAP1_110 | GTAAGGACTGACCTCAAGTTT |
| 1527 | ERAP1_111 | TTTTCTTAATCCTTCTAGGCT |
| 1528 | ERAP1_112 | TTAATCCTTCTAGGCTACTAG |
| 1529 | ERAP1_113 | TCTCCCTTAAAGCTTTCATCT |
| 1530 | ERAP1_114 | TTTTATCTCCCTTAAAGCTTT |
| 1531 | ERAP1_115 | TGGAAACTCCTGAGTTTTTAT |
| 1532 | ERAP1_116 | AGGGAGATAAAATAAAAACTC |
| 1533 | ERAP1_117 | CACAAATTCTTACACTCATTG |
| 1534 | ERAP1_118 | CTCAGAAATTGCCAGGCCAGT |
| 1535 | ERAP1_119 | TTCCAGTTTTTCCTCAGAAAT |
| 1536 | ERAP1_120 | TACAAGTTTGTTCCAGTTTTT |
| 1537 | ERAP1_121 | TGAGGAAAAACTGGAACAAAC |
| 1538 | ERAP1_122 | GCACCACTTACTTTTGTACAA |
| 1539 | ERAP1_123 | AATATTTCCCTCTCTAGGTTT |
| 1540 | ERAP1_124 | CCTCTCTAGGTTTGAACTTGG |
| 1541 | ERAP1_125 | AACTTGGCTCATCTTCCATAG |
| 1542 | ERAP1_126 | TTGTACCCATTACCATGTGGG |
| 1543 | ERAP1_127 | CCTCTTCAAGCCGTGTTCTTG |
| 1544 | ERAP1_128 | AAAGAGCTGAAGAATCCTTTT |
| 1545 | ERAP1__129 | TTTCAAAGAGCTGAAGAATCC |
| 1546 | ERAP1_130 | CTCACAAGGTAAAAGGATTCT |
| 1547 | ERAP1_131 | AAAGAAAATGGTTCTCAGCTC |
| 1548 | ERAP1_132 | AATTGTCTGTTGGACACAACG |
| 1549 | ERAP1_133 | TTCAATGGTTTCAATTGTCTG |
| 1550 | ERAP1_134 | TCAAAATTCTTATCCATCCAA |
| 1551 | ERAP1_135 | CAGCCACACTCTGATTTTATC |
| 1552 | ERAP1_136 | ACTTTGCAGCCACACTCTGAT |
| 1553 | ERAP1_137 | ATAAAATCAGAGTGTGGCTGC |
| 1554 | ERAP1_138 | CATACGTTCAAGCTTTTCACT |
| 1555 | IFNGR1_001 | TCCTACCCCTTGTCATGCAGG |
| 1556 | IFNGR1_002 | CTTTTTTATTTTCTTACAGTG |
| 1557 | IFNGR1_003 | TTTTCTTACAGTGCCTACACC |
| 1558 | IFNGR1_004 | TTACAGTGCCTACACCAACTA |
| 1559 | IFNGR1_005 | CCTCTACGGTAAAAACAGGGA |
| 1560 | IFNGR1_006 | CCGTAGAGGTAAAGAACTATG |
| 1561 | IFNGR1_007 | TTCTTTTTAGTGTTAAGAATT |
| 1562 | IFNGR1_008 | GTGTTAAGAATTCAGAATGGA |
| 1563 | IFNGR1_009 | TCATCATTATTGTAATATTTC |
| 1564 | IFNGR1_010 | ATGGATCACCAACATGATCAG |
| 1565 | IFNGR1_011 | TGATCATGTTGGTGATCCATC |
| 1566 | IFNGR1_012 | ACTCTGACCCAAAGAGAATTT |
| 1567 | IFNGR1_013 | TCCAACCCTGGCTTTAACTCT |
| 1568 | IFNGR1_014 | GGTCAGAGTTAAAGCCAGGGT |
| 1569 | IFNGR1_015 | CATAGGCAGATTCTTTTTGTC |
| 1570 | IFNGR1_016 | GGTGGTCCAATTTTTCCTGGG |
| 1571 | IFNGR1_017 | TGATATCCAGTTTAGGTGGTC |
| 1572 | IFNGR1_018 | CTTCTCCTCCTTTCTGATATC |
| 1573 | IFNGR1_019 | CAAAAACTGAAGGGTGAAATA |
| 1574 | IFNGR1_020 | ACCCTTCAGTTTTTGTAAATG |
| 1575 | IFNGR1_021 | GGGATCATAATCGACTTCCTG |
| 1576 | IFNGR1_022 | TAAATGGAGACGAGCAGGAAG |
| 1577 | IFNGR1_023 | TTTTTTCATCTAGATCCAGTA |
| 1578 | IFNGR1_024 | ATCTAGATCCAGTATAAAATA |
| 1579 | IFNGR1_025 | AGTTGTAACACCCCACACATG |
| 1580 | IFNGR1_026 | AGCAGAAGGAGTCTTACATGT |
| 1581 | IFNGR1_027 | ACTTTTCAGTTGTAACACCCC |
| 1582 | IFNGR1_028 | TACTGCTATTGAAAATGGTAA |
| 1583 | IFNGR1_029 | TATTACCATTTTCAATAGCAG |
| 1584 | IFNGR1_030 | TGCCTTTTTTAAGGTTCTCTT |
| 1585 | IFNGR1_031 | AGGTTCTCTTTGGATTCCAGT |
| 1586 | IFNGR1_032 | GATTCCAGTTGTTGCTGCTTT |
| 1587 | IFNGR1_033 | CTACTCTTTCTAGTGCTTAGC |
| 1588 | IFNGR1_034 | TTAATATAAAAACAGATGAAT |
| 1589 | IFNGR1_035 | TAGTGCTTAGCCTGGTATTCA |
| 1590 | IFNGR1_036 | CTTCAATGGATTAATTTTCTT |
| 1591 | IFNGR1_037 | TATTAAGAAAATTAATCCATT |
| 1592 | IFNGR1_038 | ATCAATTTTTCTCCCCATAGA |
| 1593 | IFNGR1_039 | TCCCCATAGATCTCTGTGGTA |
| 1594 | IFNGR1_040 | TCTCTAAAGTAGCACTTCTTA |
| 1595 | IFNGR1_041 | ATTCAGGTTTTGTCTCTAAAG |
| 1596 | IFNGR1_042 | GAGACAAAACCTGAATCAAAA |
| 1597 | IFNGR1_043 | TAAGGAAAATGGCTGGTATGA |
| 1598 | IFNGR1_044 | CTTAGAAAAGGAGGTGGTCTG |
| 1599 | IFNGR1_045 | CTGGATTGTCTTCGGTATGCA |
| 1600 | IFNGR1_046 | TTCAGTAGTCACCACTTCTGT |
| 1601 | IFNGR1_047 | TAGTATAACAGAAGTGGTGAC |
| 1602 | IFNGR1_048 | AAGCGATGCTGCCAGGTTCAG |
| 1603 | IFNGR1_049 | AGTAGTAACCAGTCTGAACCT |
| 1604 | IFNGR1_050 | TGGAGTGATACGAGTTTAAAG |
| 1605 | IFNGR1_051 | AACTCGTATCACTCCAGAAAT |
| 1606 | IFNGR1_052 | TGGAGTGATCACTCTCAGAAC |
| 1607 | IFNGR1_053 | ATACTGATTCCAGCTGTCTGG |
| 1608 | IFNGR1_054 | GGGGAAATTCTGAGTCAGATA |
| 1609 | IFNGR1_055 | TTATTTGGGGGAAATTCTGAG |
| 1610 | IFNGR1_056 | ACCTTTATTATTTGGGGGAAA |
| 1611 | IFNGR1_057 | TTTCACCTTTATTATTTGGGG |
| 1612 | IFNGR1_058 | CCCCAAATAATAAAGGTGAAA |
| 1613 | IFNGR1_059 | TTACGGTTATGAGCTCTTGTC |
| 1614 | IFNGR1_060 | TCATAACCAAAGGAGGTGGGG |
| 1615 | IFNGR1_061 | GTTATGATAAACCACATGTGC |
| 1616 | IFNGR1_062 | CCGCTATCATCCACAAGTAGA |
| 1617 | IFNGR1_063 | GAATCTTCTGTTGGTCTATAA |
| 1618 | IFNGR2_001 | tctgtccccctcaagaccctc |
| 1619 | IFNGR2_002 | CCAGCTGCCCGCTCCTCAGCA |
| 1620 | IFNGR2_003 | AACTGCACTTGGTAGACAACA |
| 1621 | IFNGR2_004 | AATAGTAAGCCGGTATTTCTG |
| 1622 | IFNGR2_005 | CTTCCCAGCACCGACAGTAAA |
| 1623 | IFNGR2_006 | AATGTCACTCTACGCCTTCGA |
| 1624 | IFNGR2_007 | TGGAGGCCCGACAGTCACTGA |
| 1625 | IFNGR2_008 | TCTTTGTAATTCTTTTTCAGT |
| 1626 | IFNGR2_009 | TAATTCTTTTTCAGTGACTGT |
| 1627 | IFNGR2_010 | AGTGACTGTCGGGCCTCCAGA |
| 1628 | IFNGR2_011 | ACATCGCTGATACCTCCACGG |
| 1629 | IFNGR2_012 | CCAGTAATGGACATAATAACA |
| 1630 | IFNGR2_013 | TTATTATGTCCATTACTGGGA |
| 1631 | IFNGR2_014 | AAACAGGTCAAAGGCCCTTTC |
| 1632 | IFNGR2_015 | AGTTATCCAATGAAATGGAGT |
| 1633 | IFNGR2_016 | AGAAGCAACTCCATTTCATTG |
| 1634 | IFNGR2_017 | ATTGGATAACTTAAAACCCTC |
| 1635 | IFNGR2_018 | TTCCAAAGCAGTTGTGCCTGG |
| 1636 | IFNGR2_019 | CAAGTCCAGGCACAACTGCTT |
| 1637 | IFNGR2_020 | GAACAAAAGTAACATCTTTAG |
| 1638 | IFNGR2_021 | GTAGCAAGATATGTTGCTTAA |
| 1639 | IFNGR2_022 | GAGTCGGGCATTTAAGCAACA |
| 1640 | IFNGR2_023 | CCATCTGCCATTGTTTCGTAG |
| 1641 | IFNGR2_024 | AGCAACATATCTTGCTACGAA |
| 1642 | IFNGR2_025 | GTGTCCTCTTTTTAGCCTCCA |
| 1643 | IFNGR2_026 | GCCTCCACTGAGCTTCAGCAA |
| 1644 | IFNGR2_027 | GTTGCTGTCGGTGCTGGCAGG |
| 1645 | IFNGR2_028 | AGGACCAGGAAGAAACAGGCT |
| 1646 | IFNGR2_029 | ATCAGGCCTCTATATTTCAGG |
| 1647 | IFNGR2_030 | TTCCTGGTCCTGAAATATAGA |
| 1648 | IFNGR2_031 | ACACTCCACCAAGCATCCCAT |
| 1649 | IFNGR2_032 | CTTTCCAACCTCCTCAAGTAT |
| 1650 | IFNGR2_033 | CAACCTCCTCAAGTATTTAAA |
| 1651 | IFNGR2_034 | AAAGACCCAACTCAGCCCATC |
| 1652 | IFNGR2_035 | GTGAGCTGTCCTTGTCCAAGG |
| 1653 | IFNGR2_036 | CGGAAACGAGATAATGGACAC |
| 1654 | IFNGR2_037 | GAGAACATCTTCTTGCTCCTT |
| 1655 | IFNGR2_038 | CGGAAAAGGAGCAAGAAGATG |
| 1656 | IFNGR2_039 | GTTCAAAGCGTTTGGAGAACA |
| 1657 | JAK1_001 | AAAATATGCAAATCTACATAC |
| 1658 | JAK1_002 | CTTCCACAACAGTATCTAAAT |
| 1659 | JAK1_003 | GCACAGAAAGCCATGGCATTG |
| 1660 | JAK1_004 | TGTGCTAAAATGAGGAGCTCC |
| 1661 | JAK1_005 | CTTTTCCTCAGGTATCTCTCC |
| 1662 | JAK1_006 | CTCAGGTATCTCTCCTCTTTG |
| 1663 | JAK1_007 | TCACAACCTCTTTGCCCTGTA |
| 1664 | JAK1_008 | GAGCATACCAGAGCTTGGTGT |
| 1665 | JAK1_009 | CCCTGTATGACGAGAACACCA |
| 1666 | JAK1_010 | CTGCCTTCCAGGTTCTATTTC |
| 1667 | JAK1_011 | ACCAATTGGCATGGAACCAAC |
| 1668 | JAK1_012 | GAGAATGACGCCACACTGACT |
| 1669 | JAK1_013 | TGCTTCTTTGGAGAATGACGC |
| 1670 | JAK1_014 | TCGTAGCCATTTTTCTGCTTC |
| 1671 | JAK1_015 | ACCAAATCATACTGTCCCTAG |
| 1672 | JAK1_016 | TCCCCCTTGCTCCTAGGGACA |
| 1673 | JAK1_017 | GTGAAATGCCTGGCTCCTATT |
| 1674 | JAK1_018 | CCTGATGTCCTTGGGCAGTTC |
| 1675 | JAK1_019 | TGGAATATATCGCTTGTAGCT |
| 1676 | JAK1_020 | TACTGTCTTTTAGCTACAAGC |
| 1677 | JAK1_021 | GCTACAAGCGATATATTCCAG |
| 1678 | JAK1_022 | TCCGCATCCTGGTGAGAAGGT |
| 1679 | JAK1_023 | GGAAATCCTTGAAAACATTAT |
| 1680 | JAK1_024 | AAGGATTTCCTAAAGGAATTT |
| 1681 | JAK1_025 | CTAAAGGAATTTAACAACAAG |
| 1682 | JAK1_026 | ACAACAAGACCATTTGTGACA |
| 1683 | JAK1_027 | ACCTTCAGGTCATGCGTGGAC |
| 1684 | JAK1_028 | TGACAGCAGCGTGTCCACGCA |
| 1685 | JAK1_029 | CAAGGTAGCCAAGTATTTCAC |
| 1686 | JAK1_030 | TCAAAGTTTCCAAGGTAGCCA |
| 1687 | JAK1_031 | AGCACCGTAATGTTTTGTCAA |
| 1688 | JAK1_032 | ACAAAACATTACGGTGCTGAA |
| 1689 | JAK1_033 | TGATGAAATCAGTAACATGGA |
| 1690 | JAK1_034 | AGACTTCCATGTTACTGATTT |
| 1691 | JAK1_035 | ATCAGAAAATGAGATGAATTG |
| 1692 | JAK1_036 | CACCGTCATTCGAATGAAACC |
| 1693 | JAK1_037 | ATTCGAATGACGGTGGAAACG |
| 1694 | JAK1_038 | TGCCTCCACTGGATTCCAAGA |
| 1695 | JAK1_039 | GTTTATGCCTCCACTGGATTC |
| 1696 | JAK1_040 | cttttcAACAGAAACAACCTG |
| 1697 | JAK1_041 | TGTATCTTATCAGGTTGTTTC |
| 1698 | JAK1_042 | tttttttccttttcAACAGAA |
| 1699 | JAK1_043 | cgcttcagtttatttttttcc |
| 1700 | JAK1_044 | TGTTgaaaaggaaaaaaataa |
| 1701 | JAK1_045 | cagttttttccgcttcagttt |
| 1702 | JAK1_046 | ttttccagttttttccgcttc |
| 1703 | JAK1_047 | TCCTCATCCTTCTTGTgttta |
| 1704 | JAK1_048 | AGGGAAGTAAGAAAAATTGTT |
| 1705 | JAK1_049 | TTACAATGTGAGTGATTTCAG |
| 1706 | JAK1_050 | TTACTTCCCTGAAATCACTCA |
| 1707 | JAK1_051 | TTGTTGTCCTGCTTGTTAATG |
| 1708 | JAK1_052 | TTCTCTCTCAACAGGAACTGA |
| 1709 | JAK1_053 | TGTCCCTGGTAGATGGCTACT |
| 1710 | JAK1_054 | TTGATGGCGTATTCTGTACTA |
| 1711 | JAK1_055 | CCTACTTCTCCCTCTAGTACA |
| 1712 | JAK1_056 | ACAACATCCTCATGACCGTCA |
| 1713 | JAK1_057 | CCGAATAGCAGGTGCAGGGTG |
| 1714 | JAK1_058 | AGATCGAGGTGCAGAAGGGCC |
| 1715 | JAK1_059 | GCATGAAGCTGATGTTATCCG |
| 1716 | JAK1_060 | TTAGTAGCCACCAGCAGGTTG |
| 1717 | JAK1_061 | GATCGGATCCTCAAGAAGGAT |
| 1718 | JAK1_062 | TCTTCTTCTCTTCAGAAGTTC |
| 1719 | JAK1_063 | AGGATCACTTTTATCTTCTTC |
| 1720 | JAK1_064 | TGGGAGACCTGTCTCATCATG |
| 1721 | JAK1_065 | AAAGAGAACACACTTACTCTC |
| 1722 | JAK1_066 | TGCCTACAGATATCATGGTGG |
| 1723 | JAK1_067 | CGGTGCATGAAGAGATCCAGA |
| 1724 | JAK1_068 | TGGAAGGGGGTCCTCTGGATC |
| 1725 | JAK1_069 | CATGGTGTGGTAAGGACATCG |
| 1726 | JAK1_070 | AATTTCCATGGTGTGGTAAGG |
| 1727 | JAK1_071 | GCAACTTTGAATTTCCATGGT |
| 1728 | JAK1_072 | CATGGACCAGGTCTTTATCCT |
| 1729 | JAK1_073 | CTCTGCAGGAGGATAAAGACC |
| 1730 | JAK1_074 | GTACACACATTTCCATGGACC |
| 1731 | JAK1_075 | CCAGAGCGTGGTTCCAAAGCT |
| 1732 | JAK1_076 | GAACCACGCTCTGGGAAATCT |
| 1733 | JAK1_077 | AAGGGGATCTCGCCATTGTAG |
| 1734 | JAK1_078 | CAGAAAGAGAGATTCTATGAA |
| 1735 | JAK1_079 | TTCCGAGCCATCATGAGAGAC |
| 1736 | JAK1_080 | TGAAACAATATCTGGATCTAA |
| 1737 | JAK1_081 | TTTTCTCTTCTGTTAGATCCA |
| 1738 | JAK1_082 | TCTTCTGTTAGATCCAGATAT |
| 1739 | JAK1_083 | AGaaaaaaaaCCAGCAACTGA |
| 1740 | JAK1_084 | AAAATGTGTGGGGTCCACTTC |
| 1741 | JAK1_085 | GGAAGCGCTTTTCAAAATGTG |
| 1742 | JAK1_086 | AAAAGCGCTTCCTAAAGAGGA |
| 1743 | JAK1_087 | CCTCCAGGGCCACTTTGGGAA |
| 1744 | JAK1_088 | GGAAGGTTGAGCTCTGCAGGT |
| 1745 | JAK1_089 | ACAGCCACCTGCTCCCCTGTA |
| 1746 | JAK1_090 | AGATCAGCTATGTGGTTACCT |
| 1747 | JAK1_091 | CTTTTTCAGATCAGCTATGTG |
| 1748 | JAK1_092 | TACTTCACAATGTTCTCATGA |
| 1749 | JAK1_093 | TAAACAGGAGGAAATGGTATT |
| 1750 | JAK1_094 | GAAGATATTCCTTAAGGCTTC |
| 1751 | JAK1_095 | TGCCTTCGGGAAGCCTTAAGG |
| 1752 | JAK1_096 | TTCTTATTCTTTGGAAGATAT |
| 1753 | JAK1_097 | TTTTGTTCTTATTCTTTGGAA |
| 1754 | JAK1_098 | AGGTTTATTTTGTTCTTATTC |
| 1755 | JAK1_099 | GCTGCTGTTTGAGGTTTATTT |
| 1756 | JAK1_100 | CCTTACAAATCTGAACGGCAT |
| 1757 | JAK1_101 | TTTTTTACCTTACAAATCTGA |
| 1758 | JAK1_102 | CTTCTCTCTCTCAGGGGATGG |
| 1759 | JAK1_103 | TTGCTGCCAAGTCCCGGTGAA |
| 1760 | JAK1_104 | GGTTCTCGGCAATACGTTCAC |
| 1761 | JAK1_105 | ACTTGGTGTTCACTCTCAACA |
| 1762 | JAK1_106 | GTTAAACCGAAGTCTCCAATT |
| 1763 | JAK1_107 | AATTGCTTTGGTTAAACCGAA |
| 1764 | JAK1_108 | ACCAAAGCAATTGAAACCGAT |
| 1765 | JAK1_109 | ATTCAGTTACCAAAACACAGG |
| 1766 | JAK1_110 | TGTTCTGCTTCCTTTCAAGGT |
| 1767 | JAK1_111 | GATTGCATTAAACATTCTGGA |
| 1768 | JAK1_112 | AAGGTATGCTCCAGAATGTTT |
| 1769 | JAK1_113 | ATGCAATCTAAATTTTATATT |
| 1770 | JAK1_114 | TATTGCCTCTGACGTCTGGTC |
| 1771 | JAK1_115 | GAGTCACTCTGCATGAGCTGC |
| 1772 | JAK1_116 | TTTGATTTTATTTTATATAGT |
| 1773 | JAK1_117 | ATTTTATTTTATATAGTTGTT |
| 1774 | JAK1_118 | TTTTATATAGTTGTTCCTGAA |
| 1775 | JAK1_119 | TATAGTTGTTCCTGAAAATGA |
| 1776 | JAK1_120 | ACGTATTCACAAGTCTTGTGA |
| 1777 | JAK1_121 | CTTCTTTTAACGTATTCACAA |
| 1778 | JAK1_122 | CTCATAAGTTGATAAACCTGT |
| 1779 | JAK1_123 | TTTTTACAGGTTTATCAACTT |
| 1780 | JAK1_124 | CAGGTTTATCAACTTATGAGG |
| 1781 | JAK1_125 | TCAACTTATGAGGAAATGCTG |
| 1782 | JAK1_126 | AAAGTGCTTCAAATCCTTCAA |
| 1783 | JAK1_127 | AGAACCTTATTGAAGGATTTG |
| 1784 | JAK1_128 | AATGTTATTCATGCTTCTTAT |
| 1785 | JAK2_001 | TGTCATCGTAAGGCAGGCCAT |
| 1786 | JAK2_002 | CAGAAATATCACCATTCTGAT |
| 1787 | JAK2_003 | CTTCATAGAATTGGCATTTCC |
| 1788 | JAK2_004 | TGGAAATGCCAATTCTATGAA |
| 1789 | JAK2_005 | CCAAGGGAATGGTAAAGATAC |
| 1790 | JAK2_006 | CCATTCCCTTGGGAAATCTGA |
| 1791 | JAK2_007 | TTCTGCAACATACTCCCCAGA |
| 1792 | JAK2_008 | CATCTGGGGAGTATGTTGCAG |
| 1793 | JAK2_009 | GAAGCAGCAATACAGATTTCT |
| 1794 | JAK2_010 | ATACTTACCACAAGCTTTAGA |
| 1795 | JAK2_011 | TCTGCTTCTTTTCTAGGTATC |
| 1796 | JAK2_012 | TAGGTATCACACCTGTGTATC |
| 1797 | JAK2_013 | ACTCATTAAAGCAAACATATT |
| 1798 | JAK2_014 | TGTTTCACTCATTAAAGCAAA |
| 1799 | JAK2_015 | CTTTAATGAGTGAAACAGAAA |
| 1800 | JAK2_016 | ATGAGTGAAACAGAAAGGATC |
| 1801 | JAK2_017 | CTGAAGAAAGTACCTTATTCT |
| 1802 | JAK2_018 | TTATCTTGTAGATTTTACTTT |
| 1803 | JAK2_019 | CTTTCCTCGTTGGTATTGCAG |
| 1804 | JAK2_020 | CTCGTTGGTATTGCAGTGGCA |
| 1805 | JAK2_021 | TCATGTCTTACCTCTTTGCTC |
| 1806 | JAK2_022 | CTTCAAATTTTTGGTTTTAGT |
| 1807 | JAK2_023 | TCCATCCGTGCACAAAATCAT |
| 1808 | JAK2_024 | GTTTTAGTGGCGGCATGATTT |
| 1809 | JAK2_025 | GTGGCGGCATGATTTTGTGCA |
| 1810 | JAK2_026 | ATGAGTCACAGGTACTTTTAT |
| 1811 | JAK2_027 | TGCACGGATGGATAAAAGTAC |
| 1812 | JAK2_028 | GCTATTCTCATCATATCTAAC |
| 1813 | JAK2_029 | TTTGGCTATTCTCATCATATC |
| 1814 | JAK2_030 | ATCGTTTTCTTTGGCTATTCT |
| 1815 | JAK2_031 | CAAAAGAAAATTACCTGATAG |
| 1816 | JAK2_032 | GTAAGAATGTCTTGTAGCTAG |
| 1817 | JAK2_033 | TCCCTAGCTACAAGACATTCT |
| 1818 | JAK2_034 | CTCGAATACATTTTGGTAAGA |
| 1819 | JAK2_035 | ACAAGGAAGCGAATAAGGTAC |
| 1820 | JAK2_036 | CATTGGCTGAATTGCTGAATA |
| 1821 | JAK2_037 | GCAGATTTATTCAGCAATTCA |
| 1822 | JAK2_038 | TGGCAGTGGCTTTGCATTGGC |
| 1823 | JAK2_039 | TTCAGCAATTCAGCCAATGCA |
| 1824 | JAK2_040 | AAGTTTCTGGCAGTGGCTTTG |
| 1825 | JAK2_041 | TAAGATACTTAAGTTTCAAGT |
| 1826 | JAK2_042 | CAGATTTATAAGATACTTAAG |
| 1827 | JAK2_043 | TCTGTGTAGAAGGCAGACTGC |
| 1828 | JAK2_044 | CTTCAAATTTCTCTGTGTAGA |
| 1829 | JAK2_045 | AAGTAAAAGAACCTGGAAGTG |
| 1830 | JAK2_046 | CAGTTATTATAATGGTTGCAA |
| 1831 | JAK2_047 | CAACCATTATAATAACTGGAA |
| 1832 | JAK2_048 | CCTCTTGACCACTGAATTCCA |
| 1833 | JAK2_049 | TGTTTCCCTCTTGACCACTGA |
| 1834 | JAK2_050 | TTTATGTTTCCCTCTTGACCA |
| 1835 | JAK2_051 | CATGCTTTTAATTATAGGATT |
| 1836 | JAK2_052 | ATTATAGGATTTACAGTTATA |
| 1837 | JAK2_053 | CAGTTATATTGCGATTTTCCT |
| 1838 | JAK2_054 | CTTGCTTAATACTGACATCAA |
| 1839 | JAK2_055 | CTAATATTATTGATGTCAGTA |
| 1840 | JAK2_056 | AACCCTCTTGGTTTGCTTGCT |
| 1841 | JAK2_057 | ATTTGAACCCTCTTGGTTTGC |
| 1842 | JAK2_058 | CCATCTTGCTTATGGATAGTT |
| 1843 | JAK2_059 | TTTTTCTTTTCTCTGCTTAGG |
| 1844 | JAK2_060 | TTTTCTCTGCTTAGGAAATTG |
| 1845 | JAK2_061 | TCTGCTTAGGAAATTGAACTT |
| 1846 | JAK2_062 | TCTTTCGTGTCATTAATTGAT |
| 1847 | JAK2_063 | GTGTCATTAATTGATGGATAT |
| 1848 | JAK2_064 | CAGAGGTAATGATGTGCATCT |
| 1849 | JAK2_065 | AAGCACGGCTGGAGGTGCTAC |
| 1850 | JAK2_066 | TATATTTTCAAGCACGGCTGG |
| 1851 | JAK2_067 | AGTCTGTATTACTCACGAAAT |
| 1852 | JAK2_068 | CTAATGGCAAAATCCATCCTA |
| 1853 | JAK2_069 | TTCAGTTTACTAATGGCAAAA |
| 1854 | JAK2_070 | CCTTTAGGATGGATTTTGCCA |
| 1855 | JAK2_071 | GGATGGATTTTGCCATTAGTA |
| 1856 | JAK2_072 | CCATTAGTAAACTGAAGAAAG |
| 1857 | JAK2_073 | TTAAAGTCCTTAGGACTGCAT |
| 1858 | JAK2_074 | ATAAATATTTTTTGACTTTTG |
| 1859 | JAK2_075 | TATTCAATGACATTTTCTCGC |
| 1860 | JAK2_076 | TAATTAAACTTATACAGCGAG |
| 1861 | JAK2_077 | TAATCAAACAGTGTTTATATT |
| 1862 | JAK2_078 | ATTACAAAAAATGAGAATGAA |
| 1863 | JAK2_079 | TCCCACTGAGGTTGTACTCTT |
| 1864 | JAK2_080 | AGACTGCTGAAGTTCTTCTTT |
| 1865 | JAK2_081 | CATCTGGTAACAATTCAAAAG |
| 1866 | JAK2_082 | AATTGTTACCAGATGGAAACT |
| 1867 | JAK2_083 | GTAAACTGGAAAATTATATTG |
| 1868 | JAK2_084 | GGGGACAGCATTTAGTAAACT |
| 1869 | JAK2_085 | GCTTTGGGGGACAGCATTTAG |
| 1870 | JAK2_086 | CAGTTTACTAAATGCTGTCCC |
| 1871 | JAK2_087 | CTAAATGCTGTCCCCCAAAGC |
| 1872 | JAK2_088 | TTTTTTCAGATAAATCAAACC |
| 1873 | JAK2_089 | AGATAAATCAAACCTTCTAGT |
| 1874 | JAK2_090 | TGATGTACCAACCTCACCAAC |
| 1875 | JAK2_091 | GTTCATATGAGTAGGCCTCTG |
| 1876 | JAK2_092 | TGAAACACCATTTGGTTCATA |
| 1877 | JAK2_093 | TGATTTTGTGAAACACCATTT |
| 1878 | JAK2_094 | ACAAAATCAGAAATGAAGATT |
| 1879 | JAK2_095 | TTTTACCTTTTTCTCTTGAAG |
| 1880 | JAK2_096 | CCTTTTTCTCTTGAAGAATGA |
| 1881 | JAK2_097 | TAAAAGTGCCTTGGCCAAGGC |
| 1882 | JAK2_098 | TCTTGAAGAATGAAAGCCTTG |
| 1883 | JAK2_099 | AAAATCTTTGTAAAAGTGCCT |
| 1884 | JAK2_100 | CAAAGATTTTTAAAGGCGTAC |
| 1885 | JAK2_101 | AAGGCGTACGAAGAGAAGTAG |
| 1886 | JAK2_102 | ATGCAGTTGACCGTAGTCTCC |
| 1887 | JAK2_103 | AAAGAACTTCTGTTTCATGCA |
| 1888 | JAK2_104 | TCCAGAACTTTTAAAAGAACT |
| 1889 | JAK2_105 | TGTGTGCTTTATCCAGAACTT |
| 1890 | JAK2_106 | AAAGTTCTGGATAAAGCACAC |
| 1891 | JAK2_107 | TACttttttttttCCTTAGTC |
| 1892 | JAK2_108 | CTTAGTCTTTCTTTGAAGCAG |
| 1893 | JAK2_109 | TTTGAAGCAGCAAGTATGATG |
| 1894 | JAK2_110 | AAGCAGCAAGTATGATGAGCA |
| 1895 | JAK2_111 | AAACCAAATGCTTGTGAGAAA |
| 1896 | JAK2_112 | TCACAAGCATTTGGTTTTAAA |
| 1897 | JAK2_113 | GTTTTAAATTATGGAGTATGT |
| 1898 | JAK2_114 | CTTACTCTCGTCTCCACAGAC |
| 1899 | JAK2_115 | AATTATGGAGTATGTGTCTGT |
| 1900 | JAK2_116 | CAAACTCCTGAACCAGAATAT |
| 1901 | JAK2_117 | ATGCAGATATTCTGGTTCAGG |
| 1902 | JAK2_118 | AGATATGTATCTAGTGATCCA |
| 1903 | JAK2_119 | TTCTTTTTCAGATATGTATCT |
| 1904 | JAK2_120 | TAAAATTTGGATCACTAGATA |
| 1905 | JAK2_121 | GATCACTAGATACATATCTGA |
| 1906 | JAK2_122 | TACAATTTTTATTCTTTTTCA |
| 1907 | JAK2_123 | CATAATATATTTATACAATTT |
| 1908 | JAK2_124 | GCAACTTCAAGTTTCCATAAT |
| 1909 | JAK2_125 | ACTCTAATAGGAAGAAAACAC |
| 1910 | JAK2_126 | GCACATACATTCCCATGAATA |
| 1911 | JAK2_127 | CTGTCTTCCTGTCTTCTTCTC |
| 1912 | JAK2_128 | ATGAAAGGAGGATTTCCTGTC |
| 1913 | JAK2_129 | ATCAAACTTAGTGATCCTGGC |
| 1914 | JAK2_130 | GCAAAACTGTAATACTAATGC |
| 1915 | JAK2_131 | AAAGTTCTTCAGGAGAGAATA |
| 1916 | JAK2_132 | AATGCATTCAGGTGGTACCCA |
| 1917 | JAK2_133 | GGATTTTCAATGCATTCAGGT |
| 1918 | JAK2_134 | AATTTTTAGGATTTTCAATGC |
| 1919 | JAK2_135 | TCTGTTGCCAAATTTAAATTT |
| 1920 | JAK2_136 | AATTTGGCAACAGACAAATGG |
| 1921 | JAK2_137 | CCACAAAGTGGTACCAAAACT |
| 1922 | JAK2_138 | GCAACAGACAAATGGAGTTTT |
| 1923 | JAK2_139 | TCTCCTCCACTGCAGATTTCC |
| 1924 | JAK2_140 | GTACCACTTTGTGGGAAATCT |
| 1925 | JAK2_141 | TGGGAAATCTGCAGTGGAGGA |
| 1926 | JAK2_142 | AGAATCCAGAGCACTTAGAGG |
| 1927 | JAK2_143 | TGGTTCTTTAATTATAGAAGC |
| 1928 | JAK2_144 | ATTATAGAAGCTACAATTTTA |
| 1929 | JAK2_145 | GTGCAGGAAGCTGATGCCTAT |
| 1930 | JAK2_146 | TGAAGATAGGCATCAGCTTCC |
| 1931 | JAK2_147 | CTAATTCTGCCCACTTTGGTG |
| 1932 | JAK2_148 | TAAGGTTTGCTAATTCTGCCC |
| 1933 | JAK2_149 | AGGCCTTCTTTCAGAGCCATC |
| 1934 | JAK2_150 | AGAGCCATCATACGAGATCTT |
| 1935 | JAK2_151 | TGTTAATAGTTCATAATCTGG |
| 1936 | JAK2_152 | TTTCTCCAGATTATGAACTAT |
| 1937 | JAK2_153 | TCCAGATTATGAACTATTAAC |
| 1938 | JAK2_154 | GTAACATGTCATTTTCTGTTA |
| 1939 | JAK2_155 | TGGTGCCTTTGAAGACCGGGA |
| 1940 | JAK2_156 | AAATGTCTCTCTTCAAACTGT |
| 1941 | JAK2_157 | AAGACCGGGATCCTACACAGT |
| 1942 | JAK2_158 | AAGAGAGACATTTGAAATTTC |
| 1943 | JAK2_159 | CCTTGCCAAGTTGCTGTAGAA |
| 1944 | JAK2_160 | AAATTTCTACAGCAACTTGGC |
| 1945 | JAK2_161 | AAAAAATTCTGACAATTTACC |
| 1946 | JAK2_162 | TACAGCAACTTGGCAAGGTAA |
| 1947 | JAK2_163 | GGGTAATTTTGGGAGTGTGGA |
| 1948 | JAK2_164 | GGAGTGTGGAGATGTGCCGGT |
| 1949 | JAK2_165 | CAGCGACCACCTCCCCAGTGT |
| 1950 | JAK2_166 | AAAGTCTCTTAGGTGCTCTTC |
| 1951 | JAK2_167 | CCTTTCAAAGTCTCTTAGGTG |
| 1952 | JAK2_168 | AATTTCCCTTTCAAAGTCTCT |
| 1953 | JAK2_169 | AGGATTTCAATTTCCCTTTCA |
| 1954 | JAK2_170 | AAAGGGAAATTGAAATCCTGA |
| 1955 | JAK2_171 | CAATGTTGTCATGCTGTAGGG |
| 1956 | JAK2_172 | AATGGGCAGCTTACCAGCACT |
| 1957 | JAK2_173 | CACCTTTATGTTAAAAGGTCG |
| 1958 | JAK2_174 | TGTTAAAAGGTCGGCGTAATC |
| 1959 | JAK2_175 | AAGATAGTCTCGTAAACTTCC |
| 1960 | JAK2_176 | TGTTTTTGAAGATAGTCTCGT |
| 1961 | JAK2_177 | CCATATGGAAGTTTACGAGAC |
| 1962 | JAK2_178 | CGAGACTATCTTCAAAAACAT |
| 1963 | JAK2_179 | TGTGATCTATCCGTTCTTTAT |
| 1964 | JAK2_180 | TACCAAGATACTCCATACCCT |
| 1965 | JAK2_181 | TCCATAGGGTATGGAGTATCT |
| 1966 | JAK2_182 | TCGTTGCCAGATCCCTGTGGA |
| 1967 | JAK2_183 | ACTCTGTTCTCGTTCTCCACC |
| 1968 | JAK2_184 | GTTAACCCAAAATCTCCAATT |
| 1969 | JAK2_185 | TCTTGTGGCAAGACTTTGGTT |
| 1970 | JAK2_186 | TAGTATTCTTTGTCTTGTGGC |
| 1971 | JAK2_187 | GGTTAACCAAAGTCTTGCCAC |
| 1972 | JAK2_188 | CTTTATAGTATTCTTTGTCTT |
| 1973 | JAK2_189 | ACCAGGTTCTTTTACTTTATA |
| 1974 | JAK2_190 | TCATACTGAAATATACTCACC |
| 1975 | JAK2_191 | CAGGTATGCTCCAGAATCACT |
| 1976 | JAK2_192 | TGTGGCCTCAGATGTTTGGAG |
| 1977 | JAK2_193 | GAGCTTTGGAGTGGTTCTGTA |
| 1978 | JAK2_194 | GAGTGGTTCTGTATGAACTTT |
| 1979 | JAK2_195 | CTCTTCTCAATGTATGTGAAA |
| 1980 | JAK2_196 | ACATACATTGAGAAGAGTAAA |
| 1981 | JAK2_197 | TCATTGCCAATCATACGCATA |
| 1982 | JAK2_198 | TTTTAGGAATTTATGCGTATG |
| 1983 | JAK2_199 | GGAATTTATGCGTATGATTGG |
| 1984 | JAK2_200 | TGCGTATGATTGGCAATGACA |
| 1985 | JAK2_201 | ATAGAACTTTTGAAGAATAAT |
| 1986 | JAK2_202 | AAGAATAATGGAAGATTACCA |
| 1987 | JAK2_203 | GTTTATTTTCTCCTTTACAGA |
| 1988 | JAK2_204 | TTTTCTCCTTTACAGATCTAT |
| 1989 | JAK2_205 | TCCTTTACAGATCTATATGAT |
| 1990 | JAK2_206 | CAGATCTATATGATCATGACA |
| 1991 | JAK2_207 | CATTATTGTTCCAGCATTCTG |
| 1992 | JAK2_208 | ATCCACTCGAAGAGCTAGATC |
| 1993 | JAK2_209 | GGGATCTAGCTCTTCGAGTGG |
| 1994 | JAK2_210 | ATCCAGCCATGTTATCCCTTA |
| 1995 | JAK2_211 | TTTCATCCAGCCATGTTATCC |
| 1996 | TRAC043 | GAGTCTCTCAGCTGGTACACG |
| 1997 | TRAC049 | TCTGTGATATACACATCAGAA |
| 1998 | TRAC051 | TTGCTCCAGGCCACAGCACTG |
| 1999 | TRBC1_2_001 | GGTGTGGGAGATCTCTGCTTC |
| 2000 | TRBC1_2_003 | AGCCATCAGAAGCAGAGATCT |
| 2001 | CD3E_24 | AGATCCAGGATACTGAGGGCA |
| 2002 | CD3E_34 | CTTCCTCTGGGGTAGCAGACA |
| 2003 | CD3E_40 | CCCTCCTTCCTCCGCAGGACA |
| 2004 | CD3D_002 | CCCTTTAGTGAGCCCCTTCAA |
| 2005 | CD3D_003 | GTGAGCCCCTTCAAGATACCT |
| 2006 | CD3D_005 | CCAGGTCCAGTCTTGTAATGT |
| 2007 | CD3G_001 | CCGGAGGACAGAGACTGACAT |
| 2008 | CD3G_023 | CAGGTACTTTGGCCCAGTCAA |
| 2009 | CD247_001 | TGAGGGAAAGGACAAGATGAA |
| 2010 | CD247_002 | ACCGCGGCCATCCTGCAGGCA |
| 2011 | CD247_004 | GGATCCAGCAGGCCAAAGCTC |
| 2012 | B2M_30 | AGTGGGGGTGAATTCAGTGTA |
| 2013 | B2M_4 | CTCACGTCATCCAGCAGAGAA |
| 2014 | NLRC5_002 | GGGAAGGCTGGCATGGGCAAG |
| 2015 | NLRC5_011 | GGGCCACTCACAGCCTGCTGA |
| 2016 | NLRC5_019 | ATGGCTGTCCCCTGGAGCCCC |
| 2017 | CIITA_65 | GCAGCACGTGGTACAGGAGCT |
| 2018 | CIITA_80 | CAAGGACTTCAGCTGGGGGAA |
| 2019 | CIITA_36 | TGGGCTCAGGTGCTTCCTCAC |

### B. Methods for Reducing Immunogenicity of Cells

[0114] In certain embodiments, provided herein are methods. In certain embodiments, provided herein are methods for engineering cells, such as human cells. In certain embodiments, provided herein are methods for engineering cells to reduce the immunogenicity of the engineered cells. In certain embodiments, provided herein are methods for engineering cells to be introduced into a recipient that is allogeneic to the individual that was the source of the cells (also referred to herein as “allogeneic cells”) that reduce the immunogenicity of the engineered, allogeneic cells.

[0115] In certain embodiments, provided herein are methods for generating one or more modifications in the genome of a target cell. In certain embodiments, the method can generate at least 1, 2, 3, 4, 5, 6, 7, 8, 9, 10, 15, 20, 25, 30, 35, 40, 45, or 50 and/or no more than 2, 3, 4, 5, 6, 7, 8, 9, 10, 15, 20, 25, 30, 35, 40, 45, 50, or 100 genomic modifications, for example, 1-100 genomic modifications, preferably 1-20 genomic modifications, either simultaneously or sequentially (see Multiplexing section below). In certain embodiments, a first genomic modification is introduced into one or more target cells, wherein the target cell comprises a wild-type cell or a cell comprising one or more genomic modifications (see Cells comprising genomic modifications section above). In certain embodiments, the target cell comprises one or more of the modified cells as described in the Cells comprising genomic modifications section (above). In certain embodiments, the method comprises generating one or more genomic modifications in one or more target cells, wherein the one or more genomic modifications are generated simultaneously, e.g., in a single cell by introduction of all necessary components to produce the desired genomic modifications. In certain embodiments, the method comprises generating one or more genomic modifications in one or more target cells, wherein one or more of the genomic modifications are generated sequentially, e.g., where a portion of desired genetic modifications are produced in a parent cell and the remaining desired genetic modifications are produced in one or more generations of progeny from the parent cell. In certain embodiments wherein one or more genomic modifications are introduced sequentially, the one or more genomic modifications may be introduced in any suitable quantity, order, and/or combination. For example, when introducing three genomic modifications (A, B, and C) into one or more cells, the three genomic modifications can be introduced in any one of the following orders: (1) A then B then C; (2) A then C then B; (3) A and B then C; (4) A then B and C; (5) A and C then B; (6) A then C and B; (7) B then A then C; (8) B then C then A; (9) B and A then C; (10) B then A and C; (11) B and C then A; (12) B then C and A; (13) C then A then B; (14) C then B then A; (15) C and A then B; (16) C then A and B; (17) C then B and A; (18) C and B then A; or (19) A and B and C.

[0116] In certain embodiments, provided herein are methods for engineering one or more human cells. Any suitable human cell or cells may be used. In certain embodiments, the cells comprise one or more human stem cells or human immune cells. In certain embodiments, the cells comprise one or more human cells comprising an immune cell comprising a neutrophil, cosinophil, basophil, mast cell, monocyte, macrophage, dendritic cell, natural killer cell, a lymphocyte, or a combination thereof. In certain embodiments, the cells comprise one or more T cells. In certain embodiments, the cells comprise one or more chimeric antigen receptor (CAR)-T cells. In certain embodiments, the CAR T cell comprises a CAR polypeptide or portion thereof. In certain embodiments, the CAR T cell comprises two or more CAR polypeptides or portions thereof. In certain embodiments, the CAR T cell comprises a dual CAR, wherein the dual CAR comprises a first CAR polypeptide or portions thereof, and a second CAR polypeptide or portion thereof, wherein the second CAR polypeptide is different than the first CAR polypeptide and the first and second CAR polypeptides are separate. In certain embodiments, the first and second CAR polypeptides are linked by a polypeptide linker. In certain embodiments, the cells comprise one or more human stem cells comprising a human pluripotent, multipotent stem cell, embryonic stem cell, induced pluripotent stem cell, hematopoietic stem cell, a CD34+ cell, a combination thereof. In preferred embodiments, the cells comprise one or more hematopoietic stem cells. In more preferred embodiments, the cells comprise one or more CD34+ stem cells. In even more preferred embodiments, the cells comprise one or more induced pluripotent stem cells (iPSC). In certain embodiments, the cells comprise an allogeneic cell.

[0117] In certain embodiments, the one or more cells comprising one or more introduced genomic modifications are either grown, e.g., expanded, or differentiated, for example an iPSC differentiated into a T cell. In certain embodiments wherein two or more genomic modifications are introduced sequentially, the one or more target cells are expanded after introduction of the first set of genomic modifications, wherein the second set of genomic modifications are introduced into the progeny of the first set of cells. In certain embodiments, the stem cells are differentiated before or after introduction of one or more genomic modifications. In certain embodiments, the stem cells are differentiated after introduction of one or more genomic modifications.

[0118] In certain embodiments, one or more genomic modifications are introduced into a population of cells, wherein the resulting cell population comprises a plurality of cell populations each having received a different set of genomic modifications (see Cell populations section above). For example, when introducing three genomic modifications (A, B, C) into a population of cells, either sequentially and/or simultaneously, the resulting plurality of cell populations could potentially compromise any number and/or combination of the following cell populations: (1) A, (2) AB, (3) AC, (4) ABC, (5) B, (6) BC, (7) C, and/or (8) no genomic modifications. In certain embodiments, each cell population in the plurality of cell populations can be present at any percentage relative to the other cell populations, wherein the relative percentage of each population is affected by a number of factors including but not limited to delivery efficiency of the editing components, quality of the editing components, concentration of the editing components, relative efficiency and specificity of the editing events, vitality of the cells, and/or viability of the cells before or after introduction of the one or more genomic modifications.

[0119] In certain embodiments, provided herein are methods for engineering cells comprising delivering one or more site-specific nucleases to the one or more target cells. In certain embodiments, the one or more site-specific nucleases are delivered to the target cells as a polypeptide. In certain embodiments, the one or more site-specific nucleases are combined with a compatible guide nucleic acid to comprise a nucleic acid-guided nuclease system, e.g., a CRISPR/cas system. In certain embodiments, one or more polynucleotides encoding for one or more components of the nuclease system are delivered to the target cells. In a preferred embodiment, the nucleic acid-guided nuclease system comprises a Type V nuclease, more preferably a Type V-A nuclease, even more preferably a MAD2, MAD7, ART2, ART11, ART11* nucleases, yet more preferably a MAD7 nuclease.

[0120] In certain embodiments, one more guide nucleic acids comprising a spacer sequence at least partially complementary a target nucleotide sequence within a site wherein one or more genomic modifications are to be introduced are delivered to the target cells. In certain embodiments, one or more nucleic acid-guided nucleases are delivered to the target cells. In certain embodiments, a combination of one or more guide nucleic acids and nucleic acid-guided nucleases are delivered to the target cells, wherein the one or more nucleic acid-guided nucleases are optionally complexed with a guide nucleic acid (e.g., see Ribonucleoprotein (RNP) section below). In certain embodiments, one or more fully formed nucleic acid-guided nuclease complexes are delivered, e.g., RNP. In certain cases, any one of the embodiments as described in the Guide nucleic acids and donor templates section can be delivered to the target cell.

[0121] In certain embodiments, provided herein is a method of producing a non-immunogenic cell. In certain embodiments, provided herein in a method of producing a non-immunogenic stem cell or immune cell. In certain embodiments, provided herein is a method of producing a non-immunogenic CAR T cell. In certain embodiments provided herein is a method of producing a non-immunogenic CAR T cell comprising (1) modifying a genome of a cell to reduce or eliminate cell surface expression of active HLA-1 proteins in the cell and its progeny, (2) introducing intro the genome of the cell or one or more of its progeny a first polynucleotide coding for surface expression of a first CAR or portion thereof specific for a first antigen, and (3) introducing into the genome of the cell or one or more of its progeny a second polynucleotide coding for surface expression of a second CAR or portion thereof specific for a second antigen. In certain embodiments, the method further comprises modifying a genome of a cell to reduce or eliminate surface expression of active HLA-1 proteins comprising introducing a genomic modification into a B2M gene that partially or completely inactivates the B2M gene. In certain embodiments, the B2M gene is completely inactivated. In certain embodiments wherein the B2M gene is partially or complete inactivated, a first transgene coding for a B2M-HLA-1 subunit fusion protein is introduced. In certain embodiments, the B2M-HLA-1 subunit fusion protein comprising a HLA-1 subunit comprising HLA-C, -E, or -G. In a preferred embodiment, the HLA-1 subunit comprises HLA-E or -G. In certain embodiments, the first and/or second CAR or portion thereof comprises any one of the CARs as described in the Surface proteins & CARs section above. In certain embodiments, the method further comprises modifying the genome of the cell or one of its progeny to reduce or eliminate surface expression of one or more subunits of an HLA-2 protein. In certain embodiments, the one or more subunits of an HLA-2 protein is modified by introducing a genomic modification into a gene coding for a transcription factor for one or more gene encoding the one or more subunits of an HLA-2 protein. In certain embodiments, the genomic modification in the transcription factor regulating expression of one or more subunits of an HLA-2 protein at least partially or completely inactivates the transcription factor. In certain embodiments, the transcription factor is completely inactivated. In a preferred embodiment, the transcription factor comprises CIITA. In certain embodiments, the method further comprises delivering into the cell a nucleic acid-guided nuclease system, or one or more polynucleotides encoding for one or more parts of the system, comprising a nucleic acid-guided nuclease and a guide nucleic acid compatible with and capable of binding to and activating the nucleic acid-guided nuclease, wherein the guide nucleic acid comprises a targeter nucleic acid comprising a targeter stem sequence and a spacer sequence, wherein the spacer sequence is complementary to a target nucleotide sequence within a target polynucleotide of a genome of a human target cell and a modulator nucleic acid comprising a modulator stem sequence complementary to the targeter stem sequence, and, optionally, a 5′ sequence, wherein the nucleic acid-guided nuclease system target and cleave at least one strand in the target polynucleotide at or near the target nucleotide sequence. In certain embodiments, the nuclease comprises any suitable nuclease. In certain embodiments, the nuclease comprises any suitable nuclease as described in the Cas proteins section (below). In certain embodiments, the nuclease comprises a Type V nuclease, preferably a Type V-A nuclease, an ART2, ART11, ART11*, MAD2, and/or MAD7 nuclease, even more preferably a MAD7 nuclease. In certain embodiments, the nucleic acid guided nuclease system comprises a guide nucleic acid comprising a single polynucleotide and/or a guide nucleic acid comprising one or more polynucleotides, e.g., a dual guide nucleic acid, preferably the guide nucleic acid comprises a dual guide nucleic acid capable of binding to and activating a nucleic acid-guided nuclease, that, in a naturally occurring system, is activated by a single crRNA in the absence of a tracrRNA. In certain embodiments, the guide nucleic acid comprises one or more chemical modifications as described in the gNA modifications section (below). In certain embodiments, the method further comprises delivering one or more donor templates as described in the Donor templates section below. In certain embodiments, at least a portion of the donor template is inserted through an innate cell repair mechanism initiated by the generated of one or more strand breaks at or near a target nucleotide sequence by the one or more nucleic acid-guided nucleases. In certain embodiments, delivery of the one or more components for genome engineering is by electroporation.

[0122] In certain embodiments, provided herein is a method for producing a population of non-immunogenic CAR T cells comprising (1) modifying a genome of a first cell to reduce or eliminate cell surface expression of HLA-1 proteins in the first cell and its progeny, (2) introducing into the genome of the first cell a first polynucleotide coding for surface expression of a first CAR specific for a first antigen on the first cell, (3) modifying a genome of a second cell to reduce or eliminate cell surface expression of HLA-1 proteins in the second cell and its progeny, and (4) introducing into the genome of the second cell a second polynucleotide coding for surface expression of a second CAR specific for a second antigen on the second cell, wherein the first and second cells are the same cell, the first cell is a progeny of the second cell, or the second cell is a progeny of the first cell. Steps (1) through (4) may be performed in any suitable order.

[0123] In certain embodiments, provided herein is a method for producing a population of non-immunogenic CAR T cells comprising (1) modifying a genome of a first cell to reduce or eliminate cell surface expression of HLA-1 proteins in the first cell and its progeny, (2) introducing into the genome of the first cell a first polynucleotide coding for surface expression of a first CAR specific for a first antigen on the first cell, (3) modifying a genome of a second cell to reduce or eliminate cell surface expression of HLA-1 proteins in the second cell and its progeny, and (4) introducing into the genome of the second cell a second polynucleotide coding for surface expression of a second CAR specific for a second antigen on the second cell, wherein the first and second cells are the same cell, the first cell is a progeny of the second cell, or the second cell is a progeny of the first cell. In certain embodiments, steps (1) through (4) are performed simultaneously, wherein the first, second, third, and fourth cells are the same cell. In certain embodiments, one or more of steps (1) through (4) are performed sequentially, for example any one of the following sequential permutations may be employed: ABCD, ABDC, ACBD, ACDB, ADBC, ADCB, BACD, BADC, BCAD, BCDA, BDAC, BDCA, CABD, CADB, CBAD, CBDA, CDAB, CDBA, DABC, DACB, DBAC, DBCA, DCAB, DCBA. In certain embodiments, one or more of the steps may be performed simultaneously wherein at least one step is performed sequentially, for example A then BCD or A and B then C and D.

[0124] In certain embodiments, provided herein is a method of modifying a genome of a human cell comprising (1) modifying a B2M gene in the genome to reduce or eliminate expression of the B2M gene, (2) modifying a T cell receptor (TCR) subunit gene in the genome to reduce or eliminate expression of the subunit, and (3) modifying a CIITA gene in the genome to reduce or eliminate expression of the CIITA gene, wherein at least 2 of (a) to (c) are performed sequentially, not simultaneously, thereby producing a modified human cell.

### II. ENGINEERED NON-NATURALLY OCCURRING DUAL GUIDE CRISPR-CAS SYSTEMS

[0125] A CRISPR-Cas system generally comprises a Cas protein and one or more guide nucleic acids (gNAs). The Cas protein can be directed to a specific location in a double-stranded DNA target by recognizing a protospacer adjacent motif (PAM) in the non-target strand of the DNA, and the one or more guide nucleic acids can be directed to a specific location by hybridizing with a target nucleotide sequence, also referred to herein as a target sequence, in the target strand of the target polynucleotide. Typically, both PAM recognition and target nucleotide sequence hybridization are required for stable binding of a CRISPR-Cas complex to the DNA target and, if the Cas protein has an effector function (e.g., nuclease activity), activation of the effector function. As a result, when creating a CRISPR-Cas system, a guide nucleic acid can be designed to comprise a nucleotide sequence called a spacer sequence that is at least partially complementary to and can hybridize with a target nucleotide sequence, where target nucleotide sequence is located adjacent to a PAM in an orientation operable with the Cas protein. It has been observed that not all CRISPR-Cas systems designed by these criteria are equally effective. The larger polynucleotide in which a target nucleotide sequence is located may be referred to as a target polynucleotide; e.g., a chromosome or other genomic DNA, or portion thereof, or any other suitable polynucleotide within which a target nucleotide sequence is located. The target polynucleotide in double stranded DNA comprises two strands. The strand of the DNA duplex to which the spacer sequence is complementary herein is called the “target strand,” while the strand to which the spacer sequence shares sequence identity herein is called the “non-target strand.”

[0126] Two distinct classes of CRISPR-Cas systems have been identified. Class 1 CRISPR-Cas systems utilize multi-protein effector complexes, whereas class 2 CRISPR-Cas systems utilize single-protein effectors (see, Makarova et al. (2017) CELL, 168:328). Among the types of class 2 CRISPR-Cas systems, type II and type V systems typically target DNA and type VI systems typically target RNA (id.). Naturally occurring type II effector complexes include Cas9, CRISPR RNA (crRNA), and trans-activating CRISPR RNA (tracrRNA), but the crRNA and tracrRNA can be fused as a single guide RNA in an engineered system for simplicity (see, Wang et al. (2016) ANNU. REV. BIOCHEM., 85:227). Certain naturally occurring type V systems, such as type V-A, type V-C, and type V-D systems, do not require tracrRNA and use crRNA alone as the guide for cleavage of target DNA (see, Zetsche et al. (2015) CELL, 163:759; Makarova et al. (2017) CELL, 168:328.

[0127] Naturally occurring type II CRISPR-Cas systems (e.g., CRISPR-Cas9 systems) generally comprise two guide nucleic acids, called crRNA and tracrRNA, which form a complex by nucleotide hybridization. Single guide nucleic acids capable of activating type II Cas nucleases have been developed, for example, by linking the crRNA and the tracrRNA (see, e.g., U.S. Pat. Nos. 10,266,850 and 8,906,616). Naturally occurring type II Cas proteins comprise a RuvC-like nuclease domain and an HNH endonuclease domain, and recognize a 3′ G-rich PAM located immediately downstream from the target nucleotide sequence, the orientation determined using the non-target strand (i.e., the strand not hybridized with the spacer sequence) as the coordinate. The CRISPR-Cas systems cleave a double-stranded DNA to generate a blunt end. The cleavage site is generally 3-4 nucleotides upstream from the PAM on the non-target strand.

[0128] Naturally occurring Type V-A, Type V-C, and Type V-D CRISPR-Cas systems lack a tracrRNA and rely on a single crRNA to guide the CRISPR-Cas complex to the target polynucleotide. Dual guide nucleic acids capable of activating type V-A, type V-C, or type V-D Cas nucleases have been developed, for example, by splitting the single crRNA into a targeter nucleic acid and a modulator nucleic acid (see, e.g., International (PCT) Application Publication No. WO 2021/067788). Naturally occurring type V-A Cas proteins comprise a RuvC-like nuclease domain but lack an HNH endonuclease domain, and recognize a 5′ T-rich PAM located immediately upstream from the target nucleotide sequence, the orientation determined using the non-target strand (i.e., the strand not hybridized with the spacer sequence) as the coordinate. These CRISPR-Cas systems cleave a double-stranded DNA to generate a staggered double-stranded break rather than a blunt end. The cleavage site is distant from the PAM site (e.g., separated by at least 10, 11, 12, 13, 14, or 15 nucleotides downstream from the PAM on the non-target strand and/or separated by at least 15, 16, 17, 18, or 19 nucleotides upstream from the sequence complementary to PAM on the target strand).

[0129] Elements in an exemplary single guide CRISPR Cas system, e.g., a type V-A CRISPR-Cas system, are shown in FIG. 1A. The single gNA can also be called a “crRNA” or “single gRNA” where it is present in the form of an RNA. It can comprise, from 5′ to 3′, an optional 5′ sequence, e.g., a tail, a modulator stem sequence, a loop, a targeter stem sequence complementary to the modulator stem sequence, and a spacer sequence that is at least partially complementary to and can hybridize with a target sequence in the target strand of the target polynucleotide. Where a 5′ tail is present, the sequence including the 5′ tail and the modulator stem sequence can also be called a “modulator sequence” herein. A fragment of the single guide nucleic acid from the optional 5′ tail to the targeter stem sequence, also called a “scaffold sequence” herein, bind the Cas protein. In addition, the PAM in the non-target strand of the target DNA binds the Cas protein.

[0130] Elements in an exemplary dual guide type CRISPR Cas system, e.g., a dual guide type V-A CRISPR-Cas system are shown in FIG. 1B. The first guide nucleic acid, which can be called a “modulator nucleic acid” herein, comprises, from 5′ to 3′, an optional 5′ tail and a modulator stem sequence. Where a 5′ tail is present, the sequence including the 5′ tail and the modulator stem sequence can also called a “modulator sequence” herein. The second guide nucleic acid, which can be called “targeter nucleic acid” herein, comprises, from 5′ to 3′, a targeter stem sequence complementary to the modulator stem sequence and a spacer sequence that is at least partially complementary to and can hybridize with the target sequence in the target strand of the target polynucleotide. The duplex between the modulator stem sequence and the targeter stem sequence, plus the optional 5′ tail, constitute a structure that binds the Cas protein. In addition, the PAM in the non-target strand of the target DNA binds the Cas protein. It is understood that, in a dual gNA, e.g., dual gRNA, the targeter nucleic acid and the modulator nucleic acid, while not in the same nucleic acids, i.e., not linked end-to-end through a traditional internucleotide bond, can be covalently conjugated to each other through one or more chemical modifications introduced into these nucleic acids, thereby increasing the stability of the double-stranded complex and/or improving other characteristics of the system.

[0131] The terms “targeter stem sequence” and “modulator stem sequence,” as used herein, can refer to a pair of nucleotide sequences in one or more guide nucleic acids that hybridize with each other. When a targeter stem sequence and a modulator stem sequence are contained in a single guide nucleic acid, the targeter stem sequence is proximal to a spacer sequence designed to hybridize with a target nucleotide sequence, and the modulator stem sequence is proximal to the targeter stem sequence. When a targeter stem sequence and a modulator stem sequence are in separate nucleic acids, the targeter stem sequence is in the same nucleic acid as a spacer sequence designed to hybridize with a target nucleotide sequence. In a CRISPR-Cas system that naturally includes separate crRNA and tracrRNA (e.g., a type II system), the duplex formed between the targeter stem sequence and the modulator stem sequence corresponds to the duplex formed between the crRNA and the tracrRNA. In a CRISPR-Cas system that naturally includes a single crRNA but no tracrRNA (e.g., a type V-A system), the duplex formed between the targeter stem sequence and the modulator stem sequence corresponds to the stem portion of a stem-loop structure in the scaffold sequence of the crRNA. It is understood that 100% complementarity is not required between the targeter stem sequence and the modulator stem sequence. In a type V-A CRISPR-Cas system, however, the targeter stem sequence is typically 100% complementary to the modulator stem sequence.

### A. Cas Proteins

[0132] A guide nucleic acid, either as a single guide nucleic acid alone (targeter and modulator nucleic acids are part of a single polynucleotide) or as a dual gNA comprising separate targeter nucleic acid used in combination with a cognate modulator nucleic acid, is capable of binding a CRISPR Associated (Cas) protein, e.g., a Cas nuclease. In certain embodiments, the guide nucleic acid, either as a single guide nucleic acid alone (targeter and modulator nucleic acids are part of a single polynucleotide) or as a dual gNA comprising separate targeter nucleic acid used in combination with a cognate modulator nucleic acid, is capable of activating a Cas nuclease. A gNA capable of activating a particular Cas nuclease is said to be “compatible” with the Cas nuclease; a Cas nuclease capable of being activated by a particular gNA is said to be “compatible” with the gNA.

[0133] The terms “CRISPR-Associated protein,” “Cas protein,” and “Cas,” as used interchangeably herein, can refer to a naturally occurring Cas protein or an engineered Cas protein. Non-limiting examples of Cas protein engineering include but are not limited to mutations and modifications of the Cas protein that alter the activity of the Cas, alter the PAM specificity, broaden the range of recognized PAMs, and/or reduce the ability to modify one or more off-target loci as compared to a corresponding unmodified Cas. In certain embodiments, the altered activity of engineered Cas comprises altered ability (e.g., specificity or kinetics) to bind a naturally occurring gNA, e.g., gRNA or engineered gNA, e.g., gRNA, altered ability (e.g., specificity or kinetics) to bind a target nucleotide sequence, altered processivity of nucleic acid scanning, and/or altered effector (e.g., nuclease) activity. A Cas protein having nuclease activity can be referred to as a “CRISPR-Associated nuclease” or “Cas nuclease,” or simply “nuclease,” as used interchangeably herein.

[0134] In certain embodiments, the Cas protein is a type V-A, type V-C, or type V-D Cas protein. In certain embodiments, the Cas protein is a type V-A Cas protein. In other embodiments, the Cas protein is a type II Cas protein, e.g., a Cas9 protein.

[0135] In certain embodiments, a type V-A Cas nucleases comprises Cpf1. Cpf1 proteins are known in the art and are described, e.g., in U.S. Pat. Nos. 9,790,490 and 10,113,179. Cpf1 orthologs can be found in various bacterial and archacal genomes. For example, in certain embodiments, the Cpf1 protein is derived from Francisella novicida U112 (Fn), Acidaminococcus sp. BV3L6 (As), Lachnospiraceae bacterium ND2006 (Lb), Lachnospiraceae bacterium MA2020 (Lb2), Candidatus Methanoplasma termitum (CMt), Moraxella bovoculi 237 (Mb), Porphyromonas crevioricanis (Pc), Prevotella disiens (Pd), Francisella tularensis 1, Francisella tularensis subsp. novicida, Prevotella albensis, Lachnospiraceae bacterium MC2017 1, Butyrivibrio proteoclasticus, Peregrinibacteria bacterium GW2011_GWA2_33_10, Parcubacteria bacterium GW2011_GWC2_44_17, Smithella sp. SCADC, Eubacterium eligens, Leptospira inadai, Porphyromonas macacae, Prevotella bryantii, Proteocatella sphenisci, Anaerovibrio sp. RM50, Moraxella caprae, Lachnospiraceae bacterium COE1, or Eubacterium coprostanoligenes.

[0136] In certain embodiments, a type V-A Cas nuclease comprises AsCpf1 or a variant thereof. In certain embodiments, a type V-A Cas protein comprises an amino acid sequence at least 30%, 40%, 50%, 60%, 70%, 80%, 85%, 90%, 91%, 92%, 93%, 94%, 95%, 96%, 97%, 98%, 99%, or 100% identical to the amino acid sequence set forth in SEQ ID NO: 3 of International (PCT) Application Publication No. WO 2021/158918. In certain embodiments, a type V-A Cas protein comprises the amino acid sequence set forth in SEQ ID NO: 3 of International (PCT) Application Publication No. WO 2021/158918.

[0137] In certain embodiments, a type V-A Cas nuclease comprises LbCpf1 or a variant thereof. In certain embodiments, a type V-A Cas protein comprises an amino acid sequence at least 30%, 40%, 50%, 60%, 70%, 80%, 85%, 90%, 91%, 92%, 93%, 94%, 95%, 96%, 97%, 98%, 99%, or 100% identical to the amino acid sequence set forth in SEQ ID NO: 4 of International (PCT) Application Publication No. WO 2021158918. In certain embodiments, a type V-A Cas protein comprises the amino acid sequence set forth in SEQ ID NO: 4 of International (PCT) Application Publication No. WO 2021/158918.

[0138] In certain embodiments, a type V-A Cas nuclease comprises FnCpf1 or a variant thereof. In certain embodiments, a type V-A Cas protein comprises an amino acid sequence at least 30%, 40%, 50%, 60%, 70%, 80%, 85%, 90%, 91%, 92%, 93%, 94%, 95%, 96%, 97%, 98%, 99%, or 100% identical to the amino acid sequence set forth in SEQ ID NO: 5 of International (PCT) Application Publication No. WO 2021158918. In certain embodiments, a type V-A Cas protein comprises the amino acid sequence set forth in SEQ ID NO: 5 of International (PCT) Application Publication No. WO 2021/158918.

[0139] In certain embodiments, a type V-A Cas nuclease comprises Prevotella bryantii Cpf1 (PbCpf1) or a variant thereof. In certain embodiments, a type V-A Cas protein comprises an amino acid sequence at least 30%, 40%, 50%, 60%, 70%, 80%, 85%, 90%, 91%, 92%, 93%, 94%, 95%, 96%, 97%, 98%, 99%, or 100% identical to the amino acid sequence set forth in SEQ ID NO: 6 of International (PCT) Application Publication No. WO 2021/158918. In certain embodiments, a type V-A Cas protein comprises the amino acid sequence set forth in SEQ ID NO: 6 of International (PCT) Application Publication No. WO 2021/158918.

[0140] In certain embodiments, a type V-A Cas nuclease comprises Proteocatella sphenisci Cpf1 (PsCpf1) or a variant thereof. In certain embodiments, a type V-A Cas protein comprises an amino acid sequence at least 30%, 40%, 50%, 60%, 70%, 80%, 85%, 90%, 91%, 92%, 93%, 94%, 95%, 96%, 97%, 98%, 99%, or 100% identical to the amino acid sequence set forth in SEQ ID NO: 7 of International (PCT) Application Publication No. WO 2021158918. In certain embodiments, a type V-A Cas protein comprises the amino acid sequence set forth in SEQ ID NO: 7 of International (PCT) Application Publication No. WO 2021/158918.

[0141] In certain embodiments, a type V-A Cas nuclease comprises Anaerovibrio sp. RM50 Cpf1 (As2Cpf1) or a variant thereof. In certain embodiments, a type V-A Cas protein comprises an amino acid sequence at least 30%, 40%, 50%, 60%, 70%, 80%, 85%, 90%, 91%, 92%, 93%, 94%, 95%, 96%, 97%, 98%, 99%, or 100% identical to the amino acid sequence set forth in SEQ ID NO: 8 of International (PCT) Application Publication No. WO 2021158918. In certain embodiments, a type V-A Cas protein comprises the amino acid sequence set forth in SEQ ID NO: 8 of International (PCT) Application Publication No. WO 2021/158918.

[0142] In certain embodiments, a type V-A Cas nuclease comprises Moraxella caprae Cpf1 (McCpf1) or a variant thereof. In certain embodiments, a type V-A Cas protein comprises an amino acid sequence at least 30%, 40%, 50%, 60%, 70%, 80%, 85%, 90%, 91%, 92%, 93%, 94%, 95%, 96%, 97%, 98%, 99%, or 100% identical to the amino acid sequence set forth in SEQ ID NO: 9 of International (PCT) Application Publication No. WO 2021/158918. In certain embodiments, a type V-A Cas protein comprises the amino acid sequence set forth in SEQ ID NO: 9 of International (PCT) Application Publication No. WO 2021/158918.

[0143] In certain embodiments, a type V-A Cas nuclease comprises Lachnospiraceae bacterium COE1 Cpf1 (Lb3Cpf1) or a variant thereof. In certain embodiments, a type V-A Cas protein comprises an amino acid sequence at least 30%, 40%, 50%, 60%, 70%, 80%, 85%, 90%, 91%, 92%, 93%, 94%, 95%, 96%, 97%, 98%, 99%, or 100% identical to the amino acid sequence set forth in SEQ ID NO: 10 of International (PCT) Application Publication No. WO 2021158918. In certain embodiments, a type V-A Cas protein comprises the amino acid sequence set forth in SEQ ID NO: 10 of International (PCT) Application Publication No. WO 2021/158918.

[0144] In certain embodiments, a type V-A Cas nuclease comprises Eubacterium coprostanoligenes Cpf1 (EcCpf1) or a variant thereof. In certain embodiments, a type V-A Cas protein comprises an amino acid sequence at least 30%, 40%, 50%, 60%, 70%, 80%, 85%, 90%, 91%, 92%, 93%, 94%, 95%, 96%, 97%, 98%, 99%, or 100% identical to the amino acid sequence set forth in SEQ ID NO: 11 of International (PCT) Application Publication No. WO 2021158918. In certain embodiments, a type V-A Cas protein comprises the amino acid sequence set forth in SEQ ID NO: 11 of International (PCT) Application Publication No. WO 2021/158918.

[0145] In certain embodiments, a type V-A Cas nuclease is not Cpf1. In certain embodiments, a type V-A Cas nuclease is not AsCpf1.

[0146] In certain embodiments, a type V-A Cas nuclease comprises MAD1, MAD2, MAD3, MAD4, MAD5, MAD6, MAD7, MAD8, MAD9, MAD10, MAD11, MAD12, MAD13, MAD14, MAD15, MAD16, MAD17, MAD18, MAD19, or MAD20, or variants thereof. MAD1-MAD20 are known in the art and are described in U.S. Pat. No. 9,982,279.

[0147] In certain embodiments, a type V-A Cas nuclease comprises MAD7 or a variant thereof. In certain embodiments, a type V-A Cas protein comprises an amino acid sequence at least 30%, 40%, 50%, 60%, 70%, 80%, 85%, 90%, 91%, 92%, 93%, 94%, 95%, 96%, 97%, 98%, 99%, or 100% identical to the amino acid sequence set forth in SEQ ID NO: 37. In certain embodiments, a type V-A Cas protein comprises the amino acid sequence set forth in SEQ ID NO: 37.

MAD7
(SEQ ID NO: 37)
MNNGTNNFQNFIGISSLQKTLRNALIPTETTQQFIVKNGIIKEDE
LRGENRQILKDIMDDYYRGFISETLSSIDDIDWTSLFEKMEIQLK
NGDNKDTLIKEQTEYRKAIHKKFANDDRFKNMFSAKLISDILPEF
VIHNNNYSASEKEEKTQVIKLESRFATSFKDYFKNRANCESADDI
SSSSCHRIVNDNAEIFFSNALVYRRIVKSLSNDDINKISGDMKDS
LKEMSLEEIYSYEKYGEFITQEGISFYNDICGKVNSFMNLYCQKN
KENKNLYKLQKLHKQILCIADTSYEVPYKFESDEEVYQSVNGELD
NISSKHIVERLRKIGDNYNGYNLDKIYIVSKFYESVSQKTYRDWE
TINTALEIHYNNILPGNGKSKADKVKKAVKNDLQKSITEINELVS
NYKLCSDDNIKAETYIHEISHILNNFEAQELKYNPEIHLVESELK
ASELKNVLDVIMNAFHWCSVFMTEELVDKDNNFYAELEEIYDEIY
PVISLYNLVRNYVTQKPYSTKKIKLNFGIPTLADGWSKSKEYSNN
AIILMRDNLYYLGIFNAKNKPDKKIIEGNTSENKGDYKKMIYNLL
PGPNKMIPKVFLSSKTGVETYKPSAYILEGYKQNKHIKSSKDFDI
TFCHDLIDYFKNCIAIHPEWKNFGFDFSDTSTYEDISGFYREVEL
QGYKIDWTYISEKDIDLLQEKGQLYLFQIYNKDFSKKSTGNDNLH
TMYLKNLFSEENLKDIVLKLNGEAEIFFRKSSIKNPIIHKKGSIL
VNRTYEAEEKDQFGNIQIVRKNIPENIYQELYKYFNDKSDKELSD
EAAKLKNVVGHHEAATNIVKDYRYTYDKYFLHMPITINFKANKTG
FINDRILQYIAKEKDLHVIGIDRGERNLIYVSVIDTCGNIVEQKS
FNIVNGYDYQIKLKQQEGARQIARKEWKEIGKIKEIKEGYLSLVI
HEISKMVIKYNAIIAMEDLSYGFKKGRFKVERQVYQKFETMLINK
LNYLVFKDISITENGGLLKGYQLTYIPDKLKNVGHQCGCIFYVPA
AYTSKIDPTTGFVNIFKFKDLTVDAKREFIKKFDSIRYDSEKNLF
CFTEDYNNFITQNTVMSKSSWSVYTYGVRIKRRFVNGRFSNESDT
IDITKDMEKTLEMTDINWRDGHDLRQDIIDYEIVQHIFEIFRLTV
QMRNSLSELEDRDYDRLISPVLNENNIFYDSAKAGDALPKDADAN
GAYCIALKGLYEIKQITENWKEDGKFSRDKLKISNKDWEDFIQNK
RYL

[0148] In certain embodiments, a type V-A Cas nuclease comprises MAD2 or a variant thereof. In certain embodiments, a type V-A Cas protein comprises an amino acid sequence at least 30%, 40%, 50%, 60%, 70%, 80%, 85%, 90%, 91%, 92%, 93%, 94%, 95%, 96%, 97%, 98%, 99%, or 100% identical to the amino acid sequence set forth in SEQ ID NO: 38. In certain embodiments, a type V-A Cas protein comprises the amino acid sequence set forth in SEQ ID NO: 38.

MAD2
(SEQ ID NO: 38)
MSSLTKFTNKYSKQLTIKNELIPVGKTLENIKENGLIDGDEQLNE
NYQKAKIIVDDELRDFINKALNNTQIGNWRELADALNKEDEDNIE
KLQDKIRGIIVSKFETFDLFSSYSIKKDEKIIDDDNDVEEEELDL
GKKTSSFKYIFKKNLFKLVLPSYLKTTNQDKLKIISSEDNESTYF
RGFFENRKNIFTKKPISTSIAYRIVHDNFPKFLDNIRCFNVWQTE
CPQLIVKADNYLKSKNVIAKDKSLANYFTVGAYDYFLSQNGIDFY
NNIIGGLPAFAGHEKIQGLNEFINQECQKDSELKSKLKNRHAFKM
AVLFKQILSDREKSFVIDEFESDAQVIDAVKNFYAEQCKDNNVIF
NLLNLIKNIAFLSDDELDGIFIEGKYLSSVSQKLYSDWSKLRNDI
EDSANSKQGNKELAKKIKTNKGDVEKAISKYEFSLSELNSIVHDN
TKFSDLLSCTLHKVASEKLVKVNEGDWPKHLKNNEEKQKIKEPLD
ALLEIYNTLLIFNCKSENKNGNFYVDYDRCINELSSVVYLYNKTR
NYCTKKPYNTDKFKLNENSPQLGEGFSKSKENDCLTLLFKKDDNY
YVGIIRKGAKINEDDTQAIADNTDNCIFKMNYFLLKDAKKFIPKC
SIQLKEVKAHFKKSEDDYILSDKEKFASPLVIKKSTFLLATAHVK
GKKGNIKKFQKEYSKENPTEYRNSLNEWIAFCKEFLKTYKAATIF
DITTLKKAEEYADIVEFYKDVDNLCYKLEFCPIKTSFIENLIDNG
DLYLFRINNKDESSKSTGTKNLHTLYLQAIFDERNLNNPTIMLNG
GAELFYRKESIEQKNRITHKAGSILVNKVCKDGTSLDDKIRNEIY
QYENKFIDTLSDEAKKVLPNVIKKEATHDITKDKRFTSDKFFFHC
PLTINYKEGDTKQFNNEVLSFLRGNPDINIIGIDRGERNLIYVTV
INQKGEILDSVSENTVINKSSKIEQTVDYEEKLAVREKERIEAKR
SWDSISKIATLKEGYLSAIVHEICLLMIKHNAIVVLENLNAGFKR
IRGGLSEKSVYQKFEKMLINKLNYFVSKKESDWNKPSGLLNGLQL
SDQFESFEKLGIQSGFIFYVPAAYTSKIDPTTGFANVLNLSKVRN
VDAIKSFFSNFNEISYSKKEALFKFSFDLDSLSKKGFSSFVKESK
SKWNVYTFGERIIKPKNKQGYREDKRINLTFEMKKLLNEYKVSED
LENNLIPNLTSANLKDTFWKELFFIFKTTLQLRNSVINGKEDVLI
SPVKNAKGEFFVSGTHNKTLPQDCDANGAYHIALKGLMILERNNL
VREEKDTKKIMAISNVDWFEYVQKRRGVL

[0149] In certain embodiments, a type V-A Cas nucleases comprises Csm1. Csm1 proteins are known in the art and are described in U.S. Pat. No. 9,896,696. Csm1 orthologs can be found in various bacterial and archaeal genomes. For example, in certain embodiments, a Csm1 protein is derived from Smithella sp. SCADC (Sm), Sulfuricurvum sp. (Ss), or Microgenomates (Roizmanbacteria) bacterium (Mb).

[0150] In certain embodiments, a type V-A Cas nuclease comprises SmCsm1 or a variant thereof. In certain embodiments, a type V-A Cas protein comprises an amino acid sequence at least 30%, 40%, 50%, 60%, 70%, 80%, 85%, 90%, 91%, 92%, 93%, 94%, 95%, 96%, 97%, 98%, 99%, or 100% identical to the amino acid sequence set forth in SEQ ID NO: 12 of International (PCT) Application Publication No. WO 2021/158918. In certain embodiments, a type V-A Cas protein comprises the amino acid sequence set forth in SEQ ID NO: 12 of International (PCT) Application Publication No. WO 2021/158918.

[0151] In certain embodiments, a type V-A Cas nuclease comprises SsCsm1 or a variant thereof. In certain embodiments, a type V-A Cas protein comprises an amino acid sequence at least 30%, 40%, 50%, 60%, 70%, 80%, 85%, 90%, 91%, 92%, 93%, 94%, 95%, 96%, 97%, 98%, 99%, or 100% identical to the amino acid sequence set forth in SEQ ID NO: 13 of International (PCT) Application Publication No. WO 2021/158918. In certain embodiments, a type V-A Cas protein comprises the amino acid sequence set forth in SEQ ID NO: 13 of International (PCT) Application Publication No. WO 2021/158918.

[0152] In certain embodiments, a type V-A Cas nuclease comprises MbCsm1 or a variant thereof. In certain embodiments, a type V-A Cas protein comprises an amino acid sequence at least 30%, 40%, 50%, 60%, 70%, 80%, 85%, 90%, 91%, 92%, 93%, 94%, 95%, 96%, 97%, 98%, 99%, or 100% identical to the amino acid sequence set forth in SEQ ID NO: 14 of International (PCT) Application Publication No. WO 2021/158918. In certain embodiments, a type V-A Cas protein comprises the amino acid sequence set forth in SEQ ID NO: 14 of International (PCT) Application Publication No. WO 2021/158918.

[0153] In certain embodiments, the type V-A Cas nuclease comprises an ART nuclease or a variant thereof. In general, such nucleases sequences have <60% AA sequence similarity to Cas12a, <60% AA sequence similarity to a positive control nuclease, and >80% query cover. In certain embodiments, the Type V-A nuclease comprises an ART1, ART2, ART3, ART4, ART5, ART6, ART7, ART8, ART9, ART10, ART11, ART12, ART13, ART14, ART15, ART16, ART17, ART18, ART19, ART20, ART21, ART22, ART23, ART24, ART25, ART26, ART27, ART28, ART28, ART30, ART31, ART32, ART33, ART34, ART35, or ART11* (i.e., ART11_L679F, i.e., ART11 wherein leucine (L) at amino acid position 679 is replaced with phenylalanine (F)) nuclease, as shown in Table 3. In certain embodiments, the type V-A Cas protein comprises an amino acid sequence at least 30%, 40%, 50%, 60%, 70%, 80%, 85%, 90%, 91%, 92%, 93%, 94%, 95%, 96%, 97%, 98%, 99%, or 100% identical to the amino acid sequence designated for the individual ART nuclease as shown in Table 3. In certain embodiments, provided is a nucleic acid-guided nuclease comprising a nucleic acid-guided nuclease polypeptide having at least 85% identity to an amino acid sequence represented by SEQ ID NOs: 1-36 or a nucleic acid encoding a nucleic acid-guided nuclease polypeptide comprising at least 85% identity with the polynucleotide represented by SEQ ID NOs: 1-36. In certain embodiments, provided is a nucleic acid-guided nuclease comprising a polypeptide having at least 90% identity to the amino acid sequence represented by SEQ ID NOs: 1-36, wherein the polypeptide does not contain a peptide motif of YLFQIYNKDF (SEQ ID NO: 39). In certain embodiments, provided is a nucleic acid-guided nuclease comprising a nucleic acid encoding a polypeptide having at least 90% identity to nucleic acids represented by SEQ ID NOs: 808-845 wherein an encoded polypeptide does not contain a peptide motif of YLFQIYNKDF (SEQ ID NO: 39). In certain embodiments, provided is a nucleic acid-guided nuclease wherein the polypeptide comprises at least 90% identity with the amino acid sequence represented by SEQ ID NOs: 1-9. In certain embodiments, provided is a nucleic acid-guided nuclease, wherein the polypeptide comprises a polypeptide comprising at least 90% identity with the amino acid sequence represented by SEQ ID NO: 2, 11, or 36.

TABLE 3
ART nucleases

| | SEQ | |
|---|---|---|
| Name | ID NO | Amino Acid Sequence |
| ART1 | 1 | METFSGFTNLYPLSKTLRFRLIPVGETLKHFIDSGILEEDQHRAESYVK |
| | | VKAIIDDYHRAYIENSLSGFELPLESTKENSLEEYYLYHNIRNKTEEIQ |
| | | NLSSKVRTNLRKQVVAQLTKNEIFKRIDKKELIQSDLIDFVKNEPDANE |
| | | KIALISEFRNFTVYFKGFHENRRNMYSDEEKSTSIAFRLIHENLPKFID |
| | | NMEVFAKIQNTSISENFDAIQKELCPELVTLCEMEKLGYFNKTLSQKQI |
| | | DAYNTVIGGKTTSEGKKIKGLNEYINLYNQQHKQEKLPKMKLLFKQILS |
| | | DRESASWLPEKFENDSQVVGAIVNEWNTIHDTVLAEGGLKTIIASLGSY |
| | | GLEGIFLKNDLQLTDISQKATGSWGKISSEIKQKIEVMNPQKKKESYET |
| | | YQERIDKIFKSYKSFSLAFINECLRGEYKIEDYFLKLGAVNSSSLQKEN |
| | | HFSHILNTYTDVKEVIGLYSESTDTKLIQDNDSIQKIKQFLDAVKDLQA |
| | | YVKPLLGNGDETGKDERFYGDLIEYWSLLDLITPLYNMVRNYVTQKPYS |
| | | VDKIKINFQNPTLLNGWDLNKETDNTSVILRRDGKYYLAIMNNKSRKVF |
| | | LKYPSGTDRNCYEKMEYKLLPGANKMLPKVFFSKSRINEFMPNERLLSN |
| | | YEKGTHKKSGTCFSLDDCHTLIDFFKKSLDKHEDWKNFGFKFSDTSTYE |
| | | DMSGFYKEVENQGYKLSFKPIDATYVDQLVDEGKIFLFQIYNKDESEHS |
| | | KGTPNMHTLYWKMLFDETNLGDVVYKLNGEAEVFFRKASINVSHPTHPA |
| | | NIPIKKKNLKHKDEERILKYDLIKDKRYTVDQFQFHVPITMNFKADGNG |
| | | NINQKAIDYLRSASDTHIIGIDRGERNLLYLVVIDGNGKICEQFSLNEI |
| | | EVEYNGEKYSTNYHDLLNVKENERKQARQSWQSIANIKDLKEGYLSQVI |
| | | HKISELMVKYNAIVVLEDLNAGFMRGRQKVEKQVYQKFEKKLIEKLNYL |
| | | VFKKQSSDLPGGLMHAYQLANKFESFNTLGKQSGFLFYIPAWNTSKMDP |
| | | VTGFVNLFDVKYESVDKAKSFFSKEDSIRYNVERDMFEWKENYGEFTKK |
| | | AEGTKTDWTVCSYGNRIITFRNPDKNSQWDNKEINLTENIKLLFERFGI |
| | | DLSSNLKDEIMQRTEKEFFIELISLFKLVLQMRNSWTGTDIDYLVSPVC |
| | | NENGEFFDSRNVDETLPQNADANGAYNIARKGMILLDKIKKSNGEKKLA |
| | | LSITNREWLSFAQGCCKNG |
| ART2 | 2 | MISNFTNQYQLSKTERFELKPVGDTLKHIEKSGLIAQDEIRSQEYQEVK |
| | | TIIDKYHKAFIDEALQNVVLSNLEEYEALFFERNRDEKAFEKLQAVLRK |
| | | EIVAHFKQHPQYKTLFKKELIKADLKNWQELSDAEKELVSHEDNFTTYF |
| | | TGEHENRANMYTDEAKHSSIAYRIIHENLPIFLINKKLFETIKQKAPHL |
| | | AQETQDALLEYLSGAIVEDMFELSYENHELSQTHIDLYNQMIGGVKQDS |
| | | IKIQGLNEKINLYRQANGLSKRELPNLKPLHKQILSDRETLSWLPESFE |
| | | SDEELMQGVQAYFESEVLAFECCDGKVNLLEKLPELLHQTQDYDESKVY |
| | | FKNDLALTAASQAIFKDYRIIKEALWEVNKPKKSKDLVADEEKFENKKN |
| | | SYFSIEQIDGALNSAQLSANMMHYFQSESTKVIEQIQLTYNDWKRNSSN |
| | | KELLKAFLDALLSYQRLLKPLNAPNDLEKDVAFYAYFDAYFTSLCGVVK |
| | | LYDKVRNEMIKKPYSLEKFKLNFENSTLLDGWDVNKESDNTAILFRKEG |
| | | LYYLGIMNKKYNKVERNISSSQDEGYQKIDYKLLPGANKMLPKVFFSDK |
| | | NKEYFKPNAKLLERYKAGEHKKGDNFDLDFCHELIDFFKTSIEKHQDWK |
| | | HFAYQFSPTESYEDLSGFYREVEQQGYKISYKNIAASFIDILVAEGKLY |
| | | FFQIYNKDESPYSKGTPNMHTLYWRALFDEKNLADVIYKINGQAEIFER |
| | | KKSIEYSQEKLQKGHHHEMLKDKFAYPIIKDRRFAFDKFQFHVPITINF |
| | | KAEGNENITPKTFEYIRSNPDNIKVIGIDRGERHLLYLSLIDAEGKIVE |
| | | QFTLNQIINSYNGKDHVIDYHAKLDAKEKDRDKARKEWGTVENIKELKE |
| | | GYLSHVIHKIATLIIEHGAVVAMEDLNFGFKRGRFKVEKQVYQKFEKAL |
| | | IDKLNYLVDKKKEPHKLGGLINALQLTSKFQSFEKMGKQNGELFYVPAW |
| | | NTSKIDPVTGFVNLFDTRYASVEKSKAFFTKFQSICYNEAKDYFELVED |
| | | YNDFTEKAKETRSEWTLCTYGERIVSFRNAEKNHQWDSKTIHLTTEFKN |
| | | LFGELHGNDVKEYILEQNSVEFFKSLIYLLKITLQMRNSITGTDIDYLV |
| | | SPVADEAGNFYDSRKADTSLPKDADANGAYNIARKGIMIMHRIQNAEDL |
| | | KKVNLAISNRDWLRNAQGLDK |
| ART3 | 3 | MIDLKQFIGIYPVSKTLRFELRPVGKTQEWIEKNRVLEGDEQKAADYPV |
| | | VKKLIDDYHKVCIHDSLNHVHEDWEPLKDAIEIFQKTKSDEAKKRLEAE |
| | | QAMMRKKIAAAIKDFKHFKELTAATPSDLITSVLPEFSDDGSLKSERGE |
| | | ATYFSGFQENRNNIYSQEAISTGVPYRLVHDNFPKFLSDLEVFERIKST |
| | | CPEVINQASAELQPFLEGVMIDDIFSLDFYNSLLTQNGIDFFNQVIGGV |
| | | SEKDKQKYRGINEFSNLYRQQHKEIAASKKAMTMIPLFKQILSDRDTLS |
| | | YIPAQIRTEDELVSSITQFYDHITHFEHDGKTINVLSEIVALLGKLDTY |
| | | DPNGICITARKLTDISQKVYGKWSVIEEKMKEKAIQQYGDISVAKNKKK |
| | | VDAFLSRKAYSLSDLCFDEEISFSRYYSELPQTLNAISGYWLQFNEWCK |
| | | SDEKQKFLNNQTGTEVVKSLLDAMMELFHKCSVLVMPEEYEVDKSFYNE |
| | | FLPLYEELDTLFLLYNKVRNYLTQKPSDVKKFKLNFESPSLASGWDQNK |
| | | EMKNNAILLFKDGKSYLGVLNAKNKAKIKDAKGDVSSSSYKKMIYKLLS |
| | | DPSKDLPHKIFAKGNLDFYKPSEYILEGRELGKYKKGPNFDKKFLHDFI |
| | | DFYKAAISIDPDWSKFNFQYSPTESYDDIGMFFSEIKKQAYKIRFTDIS |
| | | EAQVNEWVDNGQLYLFQLYNKDYAEGAHGRKNLHTLYWENLFTDENLSN |
| | | LVLKLNGQAELFCRPQSIKKPVSHKIGSKMLNRRDKSGMPIPESIYRSL |
| | | YQYYNGKKKESELTVAEKQYIDQVIVKDVTHEIIKDRRYTRQEYFFHVP |
| | | LTFNANADGNEYINEHVLNYLKDNPDVNIIGIDRGERHLIYLTLINQRG |
| | | EILKQKTFNVVNSYNYQAKLEQREKERDEARKSWDSVGKIKDLKEGELS |
| | | AVIHEITNMMIENNAIVVLEDLNFGFKRGRFKVERQVYQKFEKMLIDKL |
| | | NYLSFKDREAGEEGGILRGYQMAQKFISFQRLGKQSGFLFYIPAAYTSK |
| | | IDPVSGFVNHFNFSDITNAEKRKDFLMKMDRIEMKNGNIEFTFDYRKEK |
| | | TFQTDYQNVWTVSTFGKRIVMRIDEKGYKKMVDYEPTNDIIKAFKNKGI |
| | | LLSEGSDLKALIAEIEANATNAGFYSTLLYAFQKTLQMRNSNAVTEEDY |
| | | ILSPVAKDGHQFCSTDEANKGKDAQGNWVSKLPVDADANGAYHIALKGL |
| | | YLLRNPETKKIENEKWLQFMVEKPYLE |
| ART4 | 4 | MSYNREKMEEKELGKNQNFQEFIGVSPLQKTLRNELIPTETTKKNIAQL |
| | | DLLTEDEVRAQNREKLKEMMDDYYRDVIDSTLRGELLIDWSYLFSCMRN |
| | | HLSENSKESKRELERTQDSVRSQIHDKFAERADEKDMFGASIITKLLPT |
| | | YIKQNSKYSERYDESVKIMKLYGKFTTSLTDYFETRKNIFSKEKISSAV |
| | | GYRIVEENAEIFLQNQNAYDRICKIAGLDLHGLDNEITAYVDGKTLKEV |
| | | CSDEGFAKVITQGGIDRYNEAIGAVNQYMNLLCQKNKALKPGQFKMKRL |
| | | HKQILCKGTTSFDIPKKFENDKQVYDAVNSFTEIVTKNNDLKRLLNITQ |
| | | NANDYDMNKIYVVADAYSMISQFISKKWNLIEECLLDYYSDNLPGKGNA |
| | | KENKVKKAVKEETYRSVSQLNEVIEKYYVEKTGQSVWKVESYISSLAEM |
| | | IKLELCHEIDNDEKHNLIEDDEKISEIKELLDMYMDVFHIIKVERVNEV |
| | | LNFDETFYSEMDEIYQDMQEIVPLYNHVRNYVTQKPYKQEKYRLYFHTP |
| | | TLANGWSKSKEYDNNAIILVREDKYYLGILNAKKKPSKEIMAGKEDCSE |
| | | HAYAKMNYYLLPGANKMLPKVELSKKGIQDYHPSSYIVEGYNEKKHIKG |
| | | SKNFDIRFCRDLIDYFKECIKKHPDWNKENFEFSATETYEDISVFYREV |
| | | EKQGYRVEWTYINSEDIQKLEEDGQLFLFQIYNKDFAVGSTGKPNLHTL |
| | | YLKNLFSEENLRDIVLKLNGEAEIFFRKSSVQKPVIHKCGSILVNRTYE |
| | | ITESGTTRVQSIPESEYMELYRYFNSEKQIELSDEAKKYLDKVQCNKAK |
| | | TDIVKDYRYTMDKFFIHLPITINFKVDKGNNVNAIAQQYIAEQEDLHVI |
| | | GIDRGERNLIYVSVIDMYGRILEQKSFNLVEQVSSQGTKRYYDYKEKLQ |
| | | NREEERDKARKSWKTIGKIKELKEGYLSSVIHEIAQMVVKYNAIIAMED |
| | | LNYGFKRGRFKVERQVYQKFETMLISKLNYLADKSQAVDEPGGILRGYQ |
| | | MTYVPDNIKNVGRQCGIIFYVPAAYTSKIDPTTGFINAFKRDVVSTNDA |
| | | KENFLMKFDSIQYDIEKGLFKFSFDYKNFATHKLTLAKTKWDVYINGTR |
| | | IQNMKVEGHWLSMEVELTTKMKELLDDSHIPYEEGQNILDDLREMKDIT |
| | | TIVNGILEIFWLTVQLRNSRIDNPDYDRIISPVLNNDGEFFDSDEYNSY |
| | | IDAQKAPLPIDADANGAFCIALKGMYTANQIKENWVEGEKLPADCLKIE |
| | | HASWLAFMQGERG |
| ART5 | 5 | MSAVFKIKESTMKDFTHQYSLSKTLRFELKPVGETAERIEDFKNQGLKS |
| | | IVEEDRQRAEDYKKMKRILDDYHKEFIEEVLNDDIFTANEMESAFEVYR |
| | | KYMASKNDDKLKKEITEIFTDLRKKIAKAFENKSKEYCLYKGDESKLIN |
| | | EKKTGKDKGPGKLWYWLKAKADAGVNEFGDGQTFEQAEEALAKENNEST |
| | | YFTGFNQNRDNIYTDAEQQTAISYRVINENMTRYFDNCIRYSSIENKYP |
| | | ELVKQLEPLSGKFAPGNYKDYLSQTAIDIYNEAVGHKSDDINAKGINQF |
| | | INEYRQRNSIKGRELPIMSVLYKQILSDINKDLIIDKFENAGELLDAVK |
| | | TLHRELTDKKILLKIKQTLNEFLTEDNSEDIYIKSGTDLTAVSNAIWGE |
| | | WSVIPKALEMYAENITDMNAKAREKWLKREAYHLKTVQEAIEAYLKDNE |
| | | EFETRNISEYFTNFKSGENDLIQVVQSAYAKMESIFGIEDFHKDRRPVT |
| | | ESGEPGEGFRQVELVREYLDSLINVEHFIKPLHMERSGKPIELEDCNSN |
| | | FYDPLNEAYKELDVVFGIYNKVRNYVTQKPYSKDKFKINFQNSTLLDGW |
| | | DVNKESANSSVLLLKNGKYYLGVMKQGASNILNYRPEPSDSKNKINAKK |
| | | QLSEIALAGATDDYYEKMIYKLLPDPAKMLPKVFFSAKNIEFYNPSQEI |
| | | IYIRENGLFKKDAGDKESLKKWIGFMKTSLLKHPEWGSYFNFEFEPAED |
| | | YQDISIFYKQVAEQGYSVTFDKIKTSYIEEKVASGELYLFEIYNKDFSP |
| | | HSKGRPNLHTMYWKSLFEKENLQNLVTKLNGEAEVFFRQHSIKRNEKVV |
| | | HRANRPIQNKNPLTEKKQSIFEYDLVKDRRFTKDKFFLHCPITLNFKEA |
| | | GPGRFNDKVNKYIAGNPDIRIIGIDRGERHLLYYSLIDQSGRIVEQGTL |
| | | NQITSTLNSGGREIPKTTDYRGLLDTKEKERDKARKSWSMIENIKELKS |
| | | GYLSHIVHKLAKLMVKNNAVVVLEDLNFGFKRGRFKVEKQVYQKFEKAL |
| | | IEKLNYLVFKDARPAEPGHYLNAYQLTAPLESFKKLGKQSGFIYYVPAW |
| | | NTSKIDPVTGFVNQFYIEKNSMQYLKNFFGKFDSIRFNPDKNYFEFGFD |
| | | YKNFHNKAAKSKWTICTHGDKRSWYNRKQRKLEIHNVTENLASLLSGKG |
| | | INFADGGSIKDKILSVDDASFFKSLAFNFKLTAQLRHTFEDNGEEIDCI |
| | | ISPVAAADGTFFCSETAKKLNMELPHDADANGAYNIARKGLMVLRQIRE |
| | | SGKPKPISNADWLDFAQQNED |
| ART6 | 6 | MQERKKISHLTHRNSVQKTIRMQLNPVGKTMDYFQAKQILENDEKLKEN |
| | | YQKIKEIADRFYRNLNEDVLSKTGLDKLKDYAEIYYHCNTDAERKRLDE |
| | | CASELRKEIVKNFKNRDEYNKLENKKMIEIVLPQHLKNEDEKEVVASEK |
| | | NFTTYFTGFFTNRKNMYSDGEESTAIAYRCINENLPKHLDNVKAFEKAI |
| | | SKLSKNAIDDLDATYSGLCGTNLYDVFTVDYFNFLLPQSGITEYNKIIG |
| | | GYTTSDGTKVKGINEYINLYNQQVSKRDKIPNLKILYKQILSESEKVSF |
| | | IPPKFEDDNELLSAVSEFYANDETFDGMPLKKAIDETKLLFGNLDNSSL |
| | | NGIYIQNDRSVTNLSNSMFGSWSVIEDLWNKNYDSVNSNSRIKDIQKRE |
| | | DKRKKAYKAEKKLSLSFLQVLISNSENDEIREKSIVNYYKTSLMQLTDN |
| | | LSDKYNEAAPLLNKSYANEKGLKNDDKSISLIKNFLDAIKEIEKFIKPL |
| | | SETNITGEKNDLFYSQFTPLLDNISRIDILYDKVRNYVTQKPFSTDKIK |
| | | LNFGNSQLLNGWDRNKEKDCGAVWLCRDEKYYLAIIDKSNNSILENIDE |
| | | QDCDENDCYEKIIYKLLPGPNKMLPKVFFSEKCKKLLSPSDEILKIRKN |
| | | GTFKKGDKFSLDDCHKLIDFYKESFKKYPNWLIYNFKFKNTNEYNDIRE |
| | | FYNDVASQGYNISKMKIPTSFIDKLVDEGKIYLFQLYNKDFSPHSKGTP |
| | | NLHTLYFKMLFDERNLEDVVYKLNGEAEMFYRPASIKYDKPTHPKNTPI |
| | | KNKNTLNDKKTSTFPYDLIKDKRYTKWQFSLHFPITMNFKAPDRAMIND |
| | | DVRNLLKSCNNNFIIGIDRGERNLLYVSVIDSNGAIIYQHSLNIIGNKE |
| | | KGKTYETNYREKLATREKERTEQRRNWKAIESIKELKEGYISQAVHVIC |
| | | QLVVKYDAIIVMEKLTDGFKRGRTKFEKQVYQKFEKMLIDKLNYYVDKK |
| | | LDPDEGGGLLHAYQLTNKLESFDKLGMQSGFIFYVRPDFTSKIDPVTGF |
| | | VNLLYPRYENIDKAKDMISREDDIGYNAGEDFFEFDIDYDKFPKTASDY |
| | | RKRWTICINGERIEAFRNPAKNNEWSYRTIILAEKFKELFDNNSINYRD |
| | | SDDLKAEILSQTKGKFFEDFFKLLRLTLQMRNSNPETGEDRILSPVKDK |
| | | NGNFYDSSKYDEKSKLPCDADANGAYNIARKGLWIVEQFKKSDNVSTVG |
| | | PVIHNDKWLKFVQENDMANN |
| ART7 | 7 | MNILKENYMKEIKELTGLYSLTKTIGVELKPVGKTQELIEAKKLIEQDD |
| | | QRAEDYKIVKDIIDRYHKDFIDKCLNCVKIKKDDLEKYVSLAENSNRDA |
| | | EDFDKIKTKMRNQITEAFRKNSLFTNLFKKNLIKEYLPAFVSEEEKSVV |
| | | NKFSKFTTYFDAFNDNRKNLYSGDAKSGTIAYRLIHENLPMELDNIASF |
| | | NAISGIGVNEYFSSIETEFTDTLEGKRLTEFFQIDFENNTLTQKKIGNY |
| | | NYIVGAVNKAVNLYKQQHKTVRVPLLKPLYKMILSDRVTPSWLPERFES |
| | | DEEMLTAIKAAYESLREVLVGDNDESLRNLLLNIEHYDLEHIYIANDSG |
| | | LTSISQKIFGCYDTYTLAIKDQLQRDYPATKKQREAPDLYDERIDKLYK |
| | | KVGSFSIAYLNRLVDAKGHFTINEYYKQLGAYCREEGKEKDDFFKRIDG |
| | | AYCAISHLFFGEHGEIAQSDSDVELIQKLLEAYKGLQRFIKPLLGHGDE |
| | | ADKDNEFDAKLRKVWDELDIITPLYDKVRNWLSRKIYNPEKIKLCFENN |
| | | GKLLSGWVDSRTKSDNGTQYGGYIFRKKNEIGEYDFYLGISADTKLERR |
| | | DAAISYDDGMYERLDYYQLKSKTLLGNSYVGDYGLDSMNLLSAFKNAAV |
| | | KFQFEKEVVPKDKENVPKYLKRLKLDYAGFYQILMNDDKVVDAYKIMKQ |
| | | HILATLTSSIRVPAAIELATQKELGIDELIDEIMNLPSKSFGYFPIVTA |
| | | AIEEANKRENKPLFLFKMSNKDLSYAATASKGLRKGRGTENLHSMYLKA |
| | | LLGMTQSVEDIGSGMVFFRHQTKGLAETTARHKANEFVANKNKLNDKKK |
| | | SIFGYEIVKNKRFTVDKYLFKLSMNLNYSQPNNNKIDVNSKVREIISNG |
| | | GIKNIIGIDRGERNLLYLSLIDLKGNIVMQKSLNILKDDHNAKETDYKG |
| | | LLTEREGENKEARRNWKKIANIKDLKRGYLSQVVHIISKMMVEYNAIVV |
| | | LEDLNPGFIRGRQKIERNVYEQFERMLIDKLNFYVDKHKGANETGGLLH |
| | | ALQLTSEFKNFKKSEHQNGCLFYIPAWNTSKIDPATGFVNLENTKYTNA |
| | | VEAQEFFSKFDEIRYNEEKDWFEFEFDYDKFTQKAHGTRTKWTLCTYGM |
| | | RLRSFKNSAKQYNWDSEVVALTEEFKRILGEAGIDIHENLKDAICNLEG |
| | | KSQKYLEPLMQFMKLLLQLRNSKAGTDEDYILSPVADENGIFYDSRSCG |
| | | DQLPENADANGAYNIARKGLMLIEQIKNAEDLNNVKFDISNKAWINFAQ |
| | | QKPYKNG |
| ART8 | 8 | MAKENIFNELTGKYQLSKTLRLELKPVGNTQQMLKDEDVFEKDRIIREK |
| | | YRETRPHFDRLHREFIEQALKNQKLSDLGKYFQCLAKLQNNKKDKEAQE |
| | | EFKRISQNLRKEVNDLFKIDPLFGEGVFALLKEKYGEKDDAFLREQDGQ |
| | | YVLDENKKKISIFDSWKGFTGYFTKFQETRKNFYKDDGTATAVATRIID |
| | | QNLKRFCENIQIFKSIQKKVDFKEVEDNFSVDLEDIFSLGFYSSCELQE |
| | | GIDVYNKILGGEPKTTGEKLRGLNELINRYRQDHKGEKLPFFKMLDKQI |
| | | LSEKEKFIESIEDDEELLKTLKEFYSSAEEKTTVLKELENDFIKNNENY |
| | | DLSEIYISREALNTISHRWVSAATLPEFEKSVYEVMKKDKPSGLSFDKD |
| | | DNSYKFPDFIALSYIKGSFEKLSGEKLWKDGYFRDETRNGDKGFLIGNE |
| | | SLWTQFIKIFEFEFNSLFEAKNTERSVGYYHFKKDFEKIITNDESVNPE |
| | | DKVIIREFADNVLAIYQMAKYFAIEKKRKWMDQYDTGDFYNHPDFGYKT |
| | | KFYDNAYEKIVKARMLLQSYLTKKPFSTDKWKLNFECGYLLNGWSSSEN |
| | | TYGSLLFRTGNEYYLGVVNGSALRTEKIKRLIGNITEANSCHKMVYDFQ |
| | | KPDNKNVPRIFIRSKGDKFAPAVSELNLPVDSILEIYDKGLFKTENKNS |
| | | PFFKPSLKKLIDYFKLGFSRHASYKHYQFKWKDSSEYKNISEFYNDTIR |
| | | SCYQIKWEELNFEEVKKLINSKDLFLFQIYNKDFSEKSTGNKNLHSIYF |
| | | DGLFLDNNINAQDGVILKLSGGGEIFFRPKTDVKKLGSRTDTKGKLVIK |
| | | NKRYSQDKIFLHFPIELNYSNTQESNFNKLVRNFLADNPDINIIGVDRG |
| | | EKHLIYYAGIDQKGNTLKDKDDKDVLGSLNEINGVNYYKLLEERAKARE |
| | | KARQDWQNIQGIKDLKMGYISLVVRKLADLIIEYNAILVLEDLNMRFKQ |
| | | IHGGIEKSVYQQLEKALIEKLNFLVNKGEKDPERAGHLLRAYQLTAPES |
| | | TFKDMGKQTGVLFYTQASYTSKTCPQCGFRPNIKLHFDNLENAKKMLEK |
| | | INIVYKDNHFEIGYKVSDFTKTEKTSRGNILYGDRQGKDTFVISSKAAI |
| | | RYKWFARNIKNNELNRGESLKEHTEKGVTIQYDITECLKILYEKNGIDH |
| | | SGDITKQSIRSELPAKFYKDLLFYLYLLTNTRSSISGTEIDYINCPDCG |
| | | FHSEKGFNGCIFNGDANGAYNIARKGMLILKKINQYKDQHHTMDKMGWG |
| | | DLFIGIEEWDKYTQVVSRS |
| ART9 | 9 | MKEIKELTGLYSLTKTIGVELKPVGKTQELIEAKKLIEQDDQRAEDYKI |
| | | VKDIIDRYHKDFIDKCLNCVKIKKDDLEKYVSLAENSNRDAEDEDKIKT |
| | | KMRNQITEAFRKNSLFTNLFKKNLIKEYLPAFVSEEEKSVVNKFSKFTT |
| | | YFDAFNDNRKNLYSGDAKSGTIAYRLIHENLPMFLDNIASFNAISGIGV |
| | | NEYFSSIETEFTDTLEGKRLTEFFQIDFFNNTLTQKKIGNYNYIVGAVN |
| | | KAVNLYKQQHKTVRVPLLKPLYKMILSDRVTPSWLPERFESDEEMLTAI |
| | | KAAYESLREVLVGDNDESLRNLLLNIEHYDLEHIYIANDSGLTSISQKI |
| | | FGCYDTYTLAIKDQLQRDYPATKKQREAPDLYDERIDKLYKKVGSFSIA |
| | | YLNRLVDAKGHFTINEYYKQLGAYCREEGKEKDDFFKRIDGAYCAISHL |
| | | FFGEHGEIAQSDSDVELIQKLLEAYKGLQRFIKPLLGHGDEADKDNEED |
| | | AKLRKVWDELDIITPLYDKVRNWLSRKIYNPEKIKLCFENNGKLLSGWV |
| | | DSRTKSDNGTQYGGYIFRKKNEIGEYDFYLGISADTKLFRRDAAISYDD |
| | | GMYERLDYYQLKSKTLLGNSYVGDYGLDSMNLLSAFKNAAVKFQFEKEV |
| | | VPKDKENVPKYLKRLKLDYAGFYQILMNDDKVVDAYKIMKQHILATLTS |
| | | SIRVPAAIELATQKELGIDELIDEIMNLPSKSFGYFPIVTAAIEEANKR |
| | | ENKPLFLFKMSNKDLSYAATASKGLRKGRGTENLHSMYLKALLGMTQSV |
| | | FDIGSGMVFFRHQTKGLAETTARHKANEFVANKNKLNDKKKSIFGYEIV |
| | | KNKRFTVDKYLFKLSMNLNYSQPNNNKIDVNSKVREIISNGGIKNIIGI |
| | | DRGERNLLYLSLIDLKGNIVMQKSLNILKDDHNAKETDYKGLLTEREGE |
| | | NKEARRNWKKIANIKDLKRGYLSQVVHIISKMMVEYNAIVVLEDLNPGF |
| | | IRGRQKIERNVYEQFERMLIDKLNFYVDKHKGANETGGLLHALQLTSEF |
| | | KNFKKSEHQNGCLFYIPAWNTSKIDPATGFVNLENTKYTNAVEAQEFFS |
| | | KFDEIRYNEEKDWFEFEFDYDKFTQKAHGTRTKWTLCTYGMRLRSFKNS |
| | | AKQYNWDSEVVALTEEFKRILGEAGIDIHENLKDAICNLEGKSQKYLEP |
| | | LMQFMKLLLQLRNSKAGTDEDYILSPVADENGIFYDSRSCGDQLPENAD |
| | | ANGAYNIARKGLMLIEQIKNAEDLNNVKFDISNKAWLNFAQQKPYKNG |
| ART10 | 10 | MNFQPFFQKFVHLYPISKTLRFELIPQGATQKFISEKQVLLQDEIRARK |
| | | YPEMKQAIDGYHKDFIQRALSNIDSQVFEQALNTFEDLFLRSQAERATD |
| | | AYKKDFETAQTKLRELIVHSFEKGEFKQEYKSLFDKNLITNLLKPWVEQ |
| | | QNQIGDSNYTYHEDENKFTTYFLGFHENRKNIYSKDPHKTALAYRLIHE |
| | | NLPKFLENNKILLKIQNDHPSLWEQLQTLNQTMPQLFDGWDFSQLMQVS |
| | | FFSNTLTQTGIDQYNTIIGGISEGENRQKIQGINELINLYNQKQDKKNR |
| | | VAKLKQLYKQILSDRSTLSFLPEKFVDDTELYHAINMFYLEHLHHQSMI |
| | | NGHSYTLLERVQLLINELANYDLSKVYLAPNQLSTVSHQMFGDFGYIGR |
| | | ALNYYYMQVIQPDYEQLLASAKTTKKIEATEKLKTIFLDTPQSLVVIQA |
| | | AIDEYIQLQPSTKPHTQLTDFIISLLKQYETVADDQSIKVINVESDIEG |
| | | KYSCIKGLVNTKSESKREVLQDEKLATDIKAFMDAVNNVIKLLKPFSLN |
| | | EKLVASVEKDARFYSDFEEIYQSLLIFVPLYNKVRNYITQKPYSTEKFK |
| | | LNFNKPTLLSGWDANKEADNLSILLRKNGNYYLAIMDTAKGANKAFEPK |
| | | TLNQLKVDDTTDCYEKMVYKLLSGPSKMFPKAFKAKNNEGNYYPTPELL |
| | | TSYNNNEHLKNDKNFTLASLHAYIDWCKEYINRNPSWHQFNFKESPTQS |
| | | FQDISQFYSEVSSQSYKVHFQTIPSDYIDQLVAEGKLYLFQIYNKDFSP |
| | | NAKGKENLHTLYFKALFSDENLKQPVFKLSGEAEMFYRPASLQLANTTI |
| | | HKAGEPMAAKNPLTPNATRTLAYDIIKDRRFTTDKYLLHVPISLNFHAQ |
| | | ESMSIKKHNDLVRQMIKHNHQDLHVIGIDRGEKHLLYVSVIDLKGNIVY |
| | | QESLNSIKSEAQNFETPYHQLLQHREEGRAQARTAWGKIENIKELKDGY |
| | | LSQVVHRIQQLILKYNAIVMLEDLNFGFKRGRFKIEKQIYQKFEKALIH |
| | | KLNYVVDKSTQADELGGVRKAYQLTAPFESFEKLGKQSGVLFYVPAWNT |
| | | SKIDPVTGFVDLLKPKYENLDKAQAFFNAFDSIHYNAQKNYFEFKVNLK |
| | | QFAGLKAQAAQAEWTICSYGDERHVYQKKNAQQGETVIVNVTEELKVLF |
| | | AKNNIEVAQSVELKETICTQTQVDFFKRLMWLLQVLLALRYSSSKDKLD |
| | | YILSPVANAQGEFFDSRHASVQLPQDSDANGAYHIALKGLWVIEQLKAA |
| | | DNLDKVKLAISNDDWLHFAQQKPYLA |
| ART11 | 11 | MYYQGLTKLYPISKTIRNELIPVGKTLEHIRMNNILEADIQRKSDYERV |
| | | KKLMDDYHKQLINESLQDVHLSYVEEAADLYLNASKDKDIVDKFSKCQD |
| | | KLRKEIVNLLKSHENFPKIGNKEIIKLLQSLSDTEKDYNALDSFSKFYT |
| | | YFTSYNEVRKNLYSDEEKSSTAAYRLINENLPKELDNIKAYSIAKSAGV |
| | | RAKELTEEEQDCLEMTETFERTLTQDGIDNYNELIGKLNFAINLYNQQN |
| | | NKLKGFRKVPKMKELYKQILSEREASFVDEFVDDEALLTNVESFSAHIK |
| | | EFLESDSLSRFAEVLEESGGEMVYIKNDTSKTTFSNIVFGSWNVIDERL |
| | | AEEYDSANSKKKKDEKYYDKRHKELKKNKSYSVEKIVSLSTETEDVIGK |
| | | YIEKLQADIIAIKETREVFEKVVLKEHDKNKSLRKNTKAIEAIKSFLDT |
| | | IKDFERDIKLISGSEHEMEKNLAVYAEQENILSSIRNVDSLYNMSRNYL |
| | | TQKPFSTEKFKLNFNRATLLNGWDKNKETDNLGILLVKEGKYYLGIMNT |
| | | KANKSFVNPPKPKTDNVYHKVNYKLLPGPNKMLPKVFFAKSNLEYYKPS |
| | | EDLLAKYQAGTHKKGENFSLEDCHSLISFFKDSLEKHPDWSEFGFKFSD |
| | | TKKYDDLSGFYREVEKQGYKITYTDIDVEYIDSLVEKDELYLFQIYNKD |
| | | FSPYSKGNYNLHTLYLTMLFDERNLRNVVYKLNGEAEVFYRPASIGKDE |
| | | LIIHKSGEEIKNKNPKRAIDKPTSTFEYDIVKDRRYTKDKFMLHIPVTM |
| | | NFGVDETRRFNEVVNDAIRGDDKVRVIGIDRGERNLLYVVVVDSDGTIL |
| | | EQISLNSIINNEYSIETDYHKLLDEKEGDRDRARKNWTTIENIKELKEG |
| | | YLSQVVNVIAKLVLKYDAIICLEDLNFGFKRGRQKVEKQVYQKFEKMLI |
| | | DKLNYLVIDKSRSQENPEEVGHVLNALQLTSKFTSFKELGKQTGIIYYV |
| | | PAYLTSKIDPTTGFANLFYVKYESVEKSKDFFNREDSICENKVAGYFEF |
| | | SFDYKNFTDRACGMRSKWKVCTNGERIIKYRNEEKNSSFDDKVIVLTEE |
| | | FKKLFNEYGIAFNDCMDLTDAINAIDDASFFRKLTKLFQQTLQMRNSSA |
| | | DGSRDYIISPVENDNGEFFNSEKCDKSKPKDADANGAFNIARKGLWVLE |
| | | QLYNSSSGEKLNLAMTNAEWLEYAQQHTI |
| ART12 | 12 | MAKNFEDFKRLYPLSKTLRFEAKPIGATLDNIVKSGLLEEDEHRAASYV |
| | | KVKKLIDEYHKVFIDRVLDNGCLPLDDKGDNNSLAEYYESYVSKAQDED |
| | | AIKKFKEIQQNLLSIIAKKLTDDKAYANLFGNKLIESYKDKADKTKLID |
| | | SDLIQFINTAESTQLVSMSQDEAKELVKEFWGFTTYFEGFFKNRKNMYT |
| | | PEEKSTGIAYRLINENLPKFIDNMEAFKKAIARPEIQANMEELYSNFSE |
| | | YLNVESIQEMFLLDYYNMLLTQKQIDVYNAIIGGKTDDEHDVKIKGINE |
| | | YINLYNQQHKDDKLPKLKALFKQILSDRNAISWLPEEFNSDQEVLNAIK |
| | | DCYERLAENVLGDKVLKSLLGSLADYSLDGIFIRNDLQLTDISQKMEGN |
| | | WGVIQNAIMQNIKHVAPARKHKESEEDYEKRIAGIFKKADSFSISYIND |
| | | CLNEADPNNAYFVENYFATFGAVNTPTMQRENLFALVQNAYTEVAALLH |
| | | SDYPTVKHLAQDKANVSKIKALLDAIKSLQHFVKPLLGKGDESDKDERF |
| | | YGELASLWAELDTVTPLYNMIRNYMTRKPYSQKKIKLNFENPQLLGGWD |
| | | ANKEKDYATIILRRNGLYYLAIMDKDSRKLLGKAMPSDGECYEKMVYKE |
| | | FKDVTTMIPKCSTQLKDVQAYFKVNTDDYVLNSKAFNRPLTITKEVEDL |
| | | NNVLYGKYKKFQKGYLTATGDNVGYTHAVNVWIKFCMDFLDSYDSTCIY |
| | | DESSLKPESYLSLDSFYQDVNLLLYKLSFTDVSASFIDQLVEEGKMYLF |
| | | QIYNKDFSEYSKGTPNMHTLYWKALFDERNLADVVYKLNGQAEMFYRKK |
| | | SIENTHPTHPANHPILNKNKDNKKKESLFEYDLIKDRRYTVDKFMFHVP |
| | | ITMNFKSSGSENINQDVKAYLRHADDMHIIGIDRGERHLLYLVVIDLQG |
| | | NIKEQFSLNEIVNDYNGNTYHTNYHDLLDVREDERLKARQSWQTIENIK |
| | | ELKEGYLSQVIHKITQLMVRYHAIVVLEDLSKGFMRSRQKVEKQVYQKF |
| | | EKMLIDKLNYLVDKKTDVSTPGGLLNAYQLTCKSDSSQKLGKQSGFLFY |
| | | IPAWNTSKIDPVTGFVNLLDTHSLNSKEKIKAFFSKFDAIRYNKDKKWF |
| | | EFNLDYDKFGKKAEDTRTKWTLCTRGMRIDTERNKEKNSQWDNQEVDLT |
| | | TEMKSLLEHYYIDIHGNLKDAISTQTDKAFFTGLLHILKLTLQMRNSIT |
| | | GTETDYLVSPVADENGIFYDSRSCGDQLPENADANGAYNIARKGLMLVE |
| | | QIKDAEDLDNVKFDISNKAWLNFAQQKPYKNG |
| ART13 | 13 | MAKNFEDFKRLYSLSKTLRFEAKPIGATLDNIVKSGLLDEDEHRAASYV |
| | | KVKKLIDEYHKVFIDRVLDDGCLPLENKGNNNSLAEYYESYVSRAQDED |
| | | AKKKFKEIQQNLRSVIAKKLTEDKAYANLFGNKLIESYKDKEDKKKIID |
| | | SDLIQFINTAESTQLDSMSQDEAKELVKEFWGFVTYFYGFFDNRKNMYT |
| | | AEEKSTGIAYRLVNENLPKFIDNIEAFNRAITRPEIQENMGVLYSDESE |
| | | YLNVESIQEMFQLDYYNMLLTQKQIDVYNAIIGGKTDDEHDVKIKGINE |
| | | YINLYNQQHKDDKLPKLKALFKQILSDRNAISWLPEEFNSDQEVLNAIK |
| | | DCYERLAENVLGDKVLKSLLGSLADYSLDGIFIRNDLQLTDISQKMEGN |
| | | WGVIQNAIMQNIKRVAPARKHKESEEDYEKRIAGIFKKADSFSISYIND |
| | | CLNEADPNNAYFVENYFATFGAVNTPTMQRENLFALVQNAYTEVAALLH |
| | | SDYPTVKHLAQDKANVSKIKALLDAIKSLQHFVKPLLGKGDESDKDERF |
| | | YGELASLWAELDTVTPLYNMIRNYMTRKPYSQKKIKLNFENPQLLGGWD |
| | | ANKEKDYATIILRRNGLYYLAIMDKDSRKLLGKAMPSDGECYEKMVYKF |
| | | FKDVTTMIPKCSTQLKDVQAYFKVNTDDYVLNSKAFNKPLTITKEVEDL |
| | | NNVLYGKYKKFQKGYLTATGDNVGYTHAVNVWIKFCMDFLNSYDSTCIY |
| | | DESSLKPESYLSLDAFYQDANLLLYKLSFARASVSYINQLVEEGKMYLF |
| | | QIYNKDFSEYSKGTPNMHTLYWKALFDERNLADVVYKLNGQAEMFYRKK |
| | | SIENTHPTHPANHPILNKNKDNKKKESLFDYDLIKDRRYTVDKEMFHVP |
| | | ITMNFKSVGSENINQDVKAYLRHADDMHIIGIDRGERHLLYLVVIDLQG |
| | | NIKEQYSLNEIVNEYNGNTYHTNYHDLLDVREEERLKARQSWQTIENIK |
| | | ELKEGYLSQVIHKITQLMVRYHAIVVLEDLSKGFMRSRQKVEKQVYQKF |
| | | EKMLIDKLNYLVDKKTDVSTPGGLLNAYQLTCKSDSSQKLGKQSGFLFY |
| | | IPAWNTSKIDPVTGFVNLLDTHSLNSKEKIKAFFSKFDAIRYNKDKKWF |
| | | EFNLDYDKFGKKAEDTRTKWTLCTRGMRIDTERNKEKNSQWDNQEVDLT |
| | | TEMKSLLEHYYIDIHGNLKDAISAQTDKAFFTGLLHILKLTLQMRNSIT |
| | | GTETDYLVSPVADENGIFYDSRSCGNQLPENADANGAYNIARKGLMLIE |
| | | QIKNAEDLNNVKFDISNKAWLNFAQQKPYKNG |
| ART14 | 14 | MAKNFEDFKRLYSLSKTLRFEAKPIGATLDNIVKSDLLDEDEHRAASYV |
| | | KVKKLIDEYHKVFIDRVLDDGCLPLENKGNNNSLAEYYESYVSRAQDED |
| | | AKKKFKEIQQNLRSVIAKKLTEDKAYANLFGNKLIESYKDKEDKKKIID |
| | | SDLIQFINTAESTQLDSMSQDEAKELVKEFWGFVTYFYGFFDNRKNMYT |
| | | AEEKSTGIAYRLVNENLPKFIDNIEAFNRAITRPEIQENMGVLYSDFSE |
| | | YLNVESIQEMFQLDYYNMLLTQKQIDVYNAIIGGKTDDEHDVKIKGIND |
| | | YINLYNQKHKDDKLPKLKALFKQILSDRNAISWLPEEFNSDQEVLNAIK |
| | | DCYERLSENVLGDKVLKSMLGSLADYSLDGIFIRNDLQLTDISQKMEGN |
| | | WSVIQNAIMQNIKHVAPARKHKESEEEYENRIAGIFKKADSFSISYIDA |
| | | CLNETDPNNAYFVENYFATLGAVDTPTMQRENLFALVQNAYTEITALLH |
| | | SDYPTEKNLAQDKANVAKIKALLDAIKSLQHFVKPLLGKGDESDKDERF |
| | | YGELASLWAELDTMTPLYNMIRNYMTRKPYSQKKIKLNFENPQLLGGWD |
| | | ANKEKDYATIILRRNGLYYLAIMNKDSKKLLGKAMPSDGECYEKMVYKL |
| | | LPGANKMLPKVFFAKSRMEDFKPSKELVEKYYNGTHKKGKNFNIQDCHN |
| | | LIDYFKQSIDKHEDWSKFGFKFSDTSTYEDLSGFYREVEQQGYKLSFAR |
| | | VSVSYINQLVEEGKMYLFQIYNKDFSEYSKGTPNMHTLYWKALFDERNL |
| | | ADVVYKLNGQAEMFYRKKSIENTHPTHPANHPILNKNKDNKKKESLFGY |
| | | DLIKDRRYTVDKFLFHVPITMNFKSSGSENINQDVKAYLRHADDMHIIG |
| | | IDRGERHLLYLVVIDLQGNIKEQFSLNEIVNDYNGNTYHTNYHDLLDVR |
| | | EDERLKARQSWQTIENIKELKEGYLSQVIHKITQLMVKYHAIVVLEDLN |
| | | MGFMRGRQKVEKQVYQKFEKMLIEKLNYLVDKKADASVSGGLLNAYQLT |
| | | SKEDSFQKLGKQSGFLFYIPAWNTSKIDPVTGFVNLLDTRYQNVEKAKS |
| | | FFSKFDAIRYNKDKEWFEFNLDYDKFGKKAEGTRTKWTLCTRGMRIDTF |
| | | RNKEKNSQWDNQEVDLTAEMKSLLEHYYIDIHSNLKDAISAQTDKAFFT |
| | | GLLHILKLTLQMRNSITGTETDYLVSPVVDENGIFYDSRSCGDELPENA |
| | | DANGAYNIARKGLMMIEQIKDAKDLDNLKFDISNKAWLNFAQQKPYKNG |
| ART15 | 15 | MLFQDFTHLYPLSKTVRFELKPIGRTLEHIHAKNFLSQDETMADMYQKV |
| | | KVILDDYHRDFIADMMGEVKLTKLAEFYDVYLKFRKNPKDDELQKQLKD |
| | | LQAVLRKESVKPIGNGGKYKAGHDRLFGAKLFKDGKELGDLAKFVIAQE |
| | | GKSSPKLAHLAHFEKFSTYFTGFHDNRKNMYSDEDKHTAIAYRLIHENL |
| | | PRFIDNLQILTTIKQKHSALYDQIINELTASGLDVSLASHLDGYHKLLT |
| | | QEGITAYNRIIGEVNGYTNKHNQICHKSERIAKLRPLHKQILSDGMGVS |
| | | FLPSKFADDSEMCQAVNEFYRHYADVFAKVQSLEDGEDDHQKDGIYVEH |
| | | KNLNELSKQAFGDFALLGRVLDGYYVDVVNPEFNERFAKAKTDNAKAKL |
| | | TKEKDKFIKGVHSLASLEQAIKHHTARHDDESVQAGKLGQYFKHGLAGV |
| | | DNPIQKIHNNHSTIKGFLERERPAGERALPKIKSGKNPEMTQLRQLKEL |
| | | LDNALNVAHFAKLLMTKTTLDNQDGNFYGEFGVLYDELAKIPTLYNKVR |
| | | DYLSQKPFSTEKYKLNFGNPTLLNGWDLNKEKDNFGVILQKDGCYYLAL |
| | | LDKAHKKVFDNAPNTGKNVYQKMIYKLLPGPNKMLPRVFFAKSNLDYYN |
| | | PSAELLDKYAQGTHKKGDNFNLKDCHALIDFFKAGINKHPEWQNFGFKF |
| | | SPTSSYRDLSDFYREVEPQGYQVKFVDINADYIDELVEQGQLYLFQIYN |
| | | KDFSPKAHGKPNLHTLYFRALFSEDNLANPIYKLNGEAQIFYRKASLGM |
| | | NETTIHRAGEILENKNPDNPKERVFTYDIIKDRRYTQDKFMLHVPITMN |
| | | FGVQGMTIKEFNKKVNQSIRQYDDVNVIGIDRGERHLLYLTVINSKGEI |
| | | LEQRSLNDITTASANGTQMTTPYHKILDKREIERLNARVGWGEIETIKE |
| | | LKSGYLSHVVHQVSQLMLKYNAIVVLEDLNFGFKRGRFKVEKQIYQNFE |
| | | NALIKKLNHLELKDKADDEIGSYKNALQLTNNFTDLKNIGKQTGFLFYV |
| | | PAWNTSKIDPETGFVDLLKPRYENIAQSQAFFGKFDKICYNADKDYFEF |
| | | HIDYAKFTDKAKNSRQTWTICSHGDKRYVYDKTANQNKGATKGINVNDE |
| | | LKSLFARYHINEKQPNLVMDICQNNDKEFHKSLMYLLKTLLALRYSNAS |
| | | SDEDFILSPVANDEGVFFNSALADDTQPQNADANGAYHIALKGLWLLNE |
| | | LKNSDDLNKVKLAIDNQTWLNFAQNR |
| ART16 | 16 | MLFQDFTHLYPLSKTVRFELKPIGKTLEHIHAKNFLSQDETMADMYQKV |
| | | KAILDDYHRDFITKMMSEVTLTKLPEFYEVYLALRKNPKDDTLQKQLTE |
| | | IQTALREEVVKPIDSGGKYKAGYERLFGAKLFKDGKELGDLAKFVIAQE |
| | | GESSPKLPQIAHFEKESTYFTGFHDNRKNMYSSDDKHTAIAYRLIHENL |
| | | PRFIDNLQILVTIKQKHSVLYDQIVNELNANGLDVSLASHLDGYHKLLT |
| | | QEGITAYNRIIGEVNSYTNKHNQICHKSERIAKLRPLHKQILSDGMGVS |
| | | FLPSKFADDSEMCQAVNEFYRHYAHVFAKVQSLEDREDDYQKDGIYVEH |
| | | KNLNELSKQAFGDFALLGRVLDGYYVDVVNPEFNDKFAKAKTDNAKEKL |
| | | TKEKDKFIKGVHSLASLEQAIEHYIAGHDDESVQAGKLGQYFKHGLAGV |
| | | DNPIQKIHNSHSTIKGFLERERPAGERTLPKIKSDKSLEMTQLRQLKEL |
| | | LDNALNVVHFAKLLTTKTTLDNQDGNFYGEFGALYDELAKIATLYNKVR |
| | | DYLSQKPFSTEKYKLNFGNPTLLNGWDLNKEKDNFGVILQKDGCYYLAL |
| | | LDKAHKKVFDNAPNTGKSVYQKMVYKLLPGPNKMLPKVFFAKSNLDYYN |
| | | PSAELLDKYAQGTHKKGDNFNLKDCHALIDFFKASINKHPEWQHFGFEF |
| | | SLTSSYQDLSDFYREVEPQGYQVKFVDIDADYIDELVEQGQLYLFQIYN |
| | | KDFSPKAHGKPNLHTLYFKALFSEDNLANPIYKLNGEAEIFYRKASLDM |
| | | NETTIHRAGEVLENKNPDNPKERQFVYDIIKDKRYTQDKFMLHVPITMN |
| | | FGVQGMTIKEFNKKVNQSIQQYDEVNVIGIDRGERHLLYLTVINSKGEI |
| | | LEQRSLNDIITTSANGTQMTTPYHKILDKREIERLNARVGWGEIETIKE |
| | | LKSGYLSHVVHQISQLMLKYNAIVVLEDLNFGFKRGRFKVEKQIYQNFE |
| | | NALIKKLNHLVLKDKADNEIGSYKNALQLTNNFTDLKSIGKQTGFLFYV |
| | | PAWNTSKIDPVTGFVDLLKPRYENIAQSQAFFDKEDKICYNADKGYFEF |
| | | HIDYAKFTDKAKNSRQIWTICSHGDKRYVYDKTANQNKGATIGINVNDE |
| | | LKSLFARYRINDKQPNLVMDICQNNDKEFHKSLTYLLKALLALRYSNAS |
| | | SDEDFILSPVANDKGVFFNSALADDTQPQNADANGAYHIALKGLWLLNE |
| | | LKNSDDLDKVKLAIDNQTWLNFAQNR |
| ART17 | 17 | MLFQDFTHLYPLSKTVRFELKPIGKTLEHIHAKNFLSQDETMADMYQKV |
| | | KAILDDYHRDFITKMMSEVTLTKLPEFYEVYLALRKNPKDDTLQKQLTE |
| | | IQTALREEVVKPIDSGGKYKAGYERLFGAKLFKDGKELGDLAKFVIAQE |
| | | GESSPKLPQIAHFEKFSTYFTGFHDNRKNMYSSDDKHTAIAYRLIHENL |
| | | PRFIDNLQILVTIKQKHSVLYDQIVNELNANGLDVSLASHLDGYHKLLT |
| | | QEGITAYNRIIGEVNSYTNKHNQICHKSERIAKLRPLHKQILSDGMGVS |
| | | FLPSKFADDSEMCQAVNEFYRHYAHVFAKVQSLEDREDDYQKDGIYVEH |
| | | KNLNELSKQAFGDFALLGRVLDGYYVDVVNPEFNDKFAKAKTDNAKEKL |
| | | TKEKDKFIKGVHSLASLEQAIEHYIAGHDDESVQAGKLGQYFKHGLAGV |
| | | DNPIQKIHNSHSTIKGFLERERPAGERTLPKIKSDKSLEMTQLRQLKEL |
| | | LDNALNVVHFAKLLTTKTTLDNQDGNFYGEFGALYDELAKIATLYNKVR |
| | | DYLSQKPFSTEKYKLNFGNPTLLNGWDLNKEKDNFGVILQKDGCYYLAL |
| | | LDKAHKKVFDNAPNTGKSVYQKMVYKLLPGSNKMLPKVFFAKSNLDYYN |
| | | PSAELLDKYAQGTHKKGDNFNLKDCHALIDFFKASINKHPEWQHFGFEF |
| | | SLTSSYQDLSDFYREVEPQGYQVKFVDIDADYIDELVEQGQLYLFQIYN |
| | | KDFSPKAHGKPNLHTLYFKALFSEDNLANPIYKLNGEAEIFYRKASLDM |
| | | NETTIHRAGEVLENKNPDNPKERQFVYDIIKDKRYTQDKEMLHVPITMN |
| | | FGVQGMTIKEFNKKVNQSIQQYDEVNVIGIDRGERHLLYLTVINSKGEI |
| | | LEQRSLNDIITTSANGTQMTTPYHKILDKREIERLNARVGWGEIETIKE |
| | | LKSGYLSHVVHQISQLMLKYNAIVVLEDLNFGFKRGRFKVEKQIYQNFE |
| | | NALIKKLNHLVLKDKADNEIGSYKNALQLTNNFTDLKSIGKQTGFLFYV |
| | | PAWNTSKIDPVTGFVDLLKPRYENIAQSQAFFDKFDKICYNADKGYFEF |
| | | HIDYAKFTDKAKNSRQIWTICSHGDKRYVYDKTANQNKGATIGINVNDE |
| | | LKSLFARYRINDKQPNLVMDICQNNDKEFHKSLTYLLKALLALRYSNAS |
| | | SDEDFILSPVANDKGVFFNSALADDTQPQNADANGAYHIALKGLWLLNE |
| | | LKNSDDLDKVKLAIDNQTWLNFAQNR |
| ART18 | 18 | MKYTDFTGIYPVSKTLRFELIPQGSTVENMKREGILNNDMHRADSYKEM |
| | | KKLIDEYHKVFIERCLSDESLKYDDTGKHDSLEEYFFYYEQKRNDKTKK |
| | | IFEDIQVALRKQISKRFTGDTAFKRLFKKELIKEDLPSFVKNDPVKTEL |
| | | IKEFSDFTTYFQEFHKNRKNMYTSDAKSTAIAYRIINENLPKFIDNINA |
| | | FHIVAKVPEMQEHFKTIADELRSHLQVGDDIDKMENLQFFNKVLTQSQL |
| | | AVYNAVIGGKSEGNKKIQGINEYVNLYNQQHKKARLPMLKLLYKQILSD |
| | | RVAISWLQDEFDNDQDMLDTIEAFYNKLDSNETGVLGEGKLKQILMGLD |
| | | GYNLDGVFLRNDLQLSEVSQRLCGGWNIIKDAMISDLKRSVQKKKKETG |
| | | ADFEERVSKLFSAQNSFSIAYINQCLGQAGIRCKIQDYFACLGAKEGEN |
| | | EAETTPDIFDQIAEAYHGAAPILNARPSSHNLAQDIEKVKAIKALLDAL |
| | | KRLQRFVKPLLGRGDEGDKDSFFYGDEMPIWEVLDQLTPLYNKVRNRMT |
| | | RKPYSQEKIKLNFENSTLLNGWDLNKEHDNTSVILRREGLYYLGIMNKN |
| | | YNKIFDANNVETIGDCYEKMIYKLLPGPNKMLPKVFFSKSRVQEFSPSK |
| | | KILEIWESKSFKKGDNFNLDDCHALIDFYKDSIAKHPDWNKENFKFSDT |
| | | QSYTNISDFYRDVNQQGYSLSFTKVSVDYVNRMVDEGKLYLFQIYNKDF |
| | | SPQSKGTPNMHTLYWRMLEDERNLHNVIYKLNGEAEVFYRKASLRCDRP |
| | | THPAHQPITCKNENDSKRVCVFDYDIIKNRRYTVDKEMFHVPITINYKC |
| | | TGSDNINQQVCDYLRSAGDDTHIIGIDRGERNLLYLVIIDQHGTIKEQF |
| | | SLNEIVNEYKGNTYCTNYHTLLEEKEAGNKKARQDWQTIESIKELKEGY |
| | | LSQVIHKISMLMQRYHAIVVLEDLNGSFMRSRQKVEKQVYQKFEHMLIN |
| | | KLNYLVNKQYDAAEPGGLLHALQLTSRMDSFKKLGKQSGELFYIPAWNT |
| | | SKIDPVTGFVNLFDTRYCNEAKAKEFFEKFDDISYNDERDWFEFSFDYR |
| | | HFTNKPTGTRTQWTLCTQGTRVRTFRNPEKSNHWDNEEFDLTQAFKDLF |
| | | NKYGIDIASGLKARIVNGQLTKETSAVKDFYESLLKLLKLTLQMRNSVT |
| | | GTDIDYLVSPVADKDGIFFDSRTCGSLLPANADANGAFNIARKGLMLLR |
| | | QIQQSSIDAEKIQLAPIKNEDWLEFAQEKPYL |
| ART19 | 19 | METFSGFTNLYPLSKTLRFRLIPVGETLKYFIGSGILEEDQHRAESYVK |
| | | VKAIIDDYHRAYIENSLSGFELPLESTGKENSLEEYYLYHNIRNKTEEI |
| | | QNLSSKVRTNLRKQVVAQLTKNEIFKRIDKKELIQSDLIDFVKNEPDAN |
| | | EKIALISEFRNFTVYFKGFHENRRNMYSDEEKSTSIAFRLIHENLPKFI |
| | | DNMEVFAKIQNTSISENFDAIQKELCPELVTLCEMEKLGYENKTLSQKQ |
| | | IDAYNTVIGGKTTSEGKKIKGLNEYINLYNQQHKQEKLPKMKLLFKQIL |
| | | SDRESASWLPEKFENDSQVVGAIVNEWNTIHDTVLAEGGLKTIIASLGS |
| | | YGLEGIFLKNDLQLTDISQKATGSWGKISSEIKQKIEVMNPQKKKESYE |
| | | TYQERIDKIFKSYKSFSLAFINECLRGEYKIEDYFLKLGAVNSSSLQKE |
| | | NHFSHILNTYTDVKEVIGFYSESTDTKLIRDNGSIQKIKLFLDAVKDLQ |
| | | AYVKPLLGNGDETGKDERFYGDLIEYWSLLDLITPLYNMVRNYVTQKPY |
| | | SVDKIKINFQNPTLLNGWDLNKETDNTSVILRRDGKYYLAIMNNKSRKV |
| | | FLKYPSGTDRNCYEKMEYKLLPGANKMLPKVFFSKSRINEFMPNERLLS |
| | | NYEKGTHKKSGTCFSLDDCHTLIDFFKKSLDKHEDWKNFGFKESDTSTY |
| | | EDMSGFYKEVENQGYKLSFKPIDATYVDQLVDEGKIFLFQIYNKDFSEH |
| | | SKGTPNMHTLYWKMLFDETNLGDVVYKLNGEAEVFFRKASINVSHPTHP |
| | | ANIPIKKKNLKHKDEERILKYDLIKDKRYTVDQFQFHVPITMNFKADGN |
| | | GNINQKAIDYLRSASDTHIIGIDRGERNLLYLVVIDGNGKICEQFSLNE |
| | | IEVEYNGEKYSTNYHDLLNVKENERKQARQSWQSIANIKDLKEGYLSQV |
| | | IHKISELMVKYNAIVVLEDLNAGFMRGRQKVEKQVYQKFEKKLIEKLNY |
| | | LVFKKQSSDLPGGLMHAYQLANKFESFNTLGKQSGFLFYIPAWNTSKMD |
| | | PVTGFVNLFDVKYESVDKAKSFFSKEDSIRYNVERDMFEWKENYGEFTK |
| | | KAEGTKTDWTVCSYGNRIITFRNPDKNSQWDNKEINLTENIKLLFERFG |
| | | IDLSSNLKDEIMQRTEKEFFIELISLFKLVLQMRNSWTGTDIDYLVSPV |
| | | CNENGEFFDSRNVDETLPQNADANGAYNIARKGMILLDKIKKSNGEKKL |
| | | ALSITNREWLSFAQGCCKNG |
| ART20 | 20 | METFSGFTNLYPLSKTLRFRLIPVGETLKHFIDSGILEEDQHRAESYVK |
| | | VKAIIDDYHRAYIENSLSGFELPLESTGKENSLEEYYLYHNIRNKTEEI |
| | | QNLSSKVRTNLRKQVVVQLTKNEIFKRIDKKELIQSDLIDFVKNEPDAN |
| | | EKIALISEFRNFTVYFKGFHENRRNMYSDEEKSTSIAFRLIHENLPKFI |
| | | DNMEVFAKIQNTSISENFDAIQKELCPELVTLCEMEKLGYENKTLSQKQ |
| | | IDAYNTVIGGKTTSEGKKIKGLNEYINLYNQQHKQEKLPKMKLLFKQIL |
| | | SDRESASWLPEKFENDSQVVGAMVNEWNTIHDTVLAEGGLKTIIASLGS |
| | | YGLEGIFLKNDLQLTDISQKATGSWSKISSEIKQKIEVMNPQKKKESYE |
| | | SYQERIDKLFKSYKSFSLAFINECLRGEYKIEDYFLKLGAVNSSSLQKE |
| | | NHFSHILNAYTDVKEAIGFYSESTDTKLIQDNDSIQKIKQFLDAVKDLQ |
| | | AYVKPLLGNGDETGKDERFYGDLIEYWSLLDLITPLYNMVRNYVTQKPY |
| | | SVDKIKINFQNPTLLNGWDLNKETDNTSVILRRDGKYYLAIMNNKSRKV |
| | | FLKYPSGTDGNCYEKMEYKLLPGANKMLPKVFFSKSRINEFMPNERLLS |
| | | NYEKGTHKKSGICFSLDDCHTLIDFFKKSLDKHEDWKNFGFKESDTSTY |
| | | EDMSGFYKEVENQGYKLSFKPIDATYVDQLVDEGKIFLFQIYNKDFSEH |
| | | SKGTPNMHTLYWKMLFDETNLGDVVYKLNGEAEVFFRKASINVSHPTHP |
| | | ANIPIKKKNLKHKDEERILKYDLIKDKRYTVDQFQFHVPITMNFKADGN |
| | | GNINQKAIDYLCSASDTHIIGIDRGERNLLYLVVIDGNGKICEQFSLNE |
| | | IEVEYNGEKYSTNYHDLLNVKENERKQARQSWQSIANIKDLKEGYLSQV |
| | | IHKISELMVKYNAIVVLEDLNAGFMRGRQKVEKQVYQKFEKKLIEKLNY |
| | | LVFKKQSSDLPGGLMHAYQLANKFESFNALGKQSGFLFYIPAWNTSKMD |
| | | PVTGFVNLFDVKYESVDKAKSFFSKFDSMRYNVERDMFEWKENYGEFTK |
| | | KAEGTKTDWTVCSYGNRIITFRNPDKNSQWDNKEINLTENIKLLFERFG |
| | | IDLSSNLKDEIMQRTEKEFFIELISLFKLVLQMRNSWTGTDIDYLVSPV |
| | | CNENGEFFDSRNVDETLPQNADANGAYNIARKGMILLDKIKKSNGEKKL |
| | | ALSITNREWLSFAQGCCKNG |
| ART21 | 21 | METFSGFTNLYPLSKTLRFRLIPVGETLKHFIGSGILEEDQHRAESYVK |
| | | VKAIIDDYHRTYIENSLSGFELPLESTGKENSLEEYYLYHNIRNKTEEI |
| | | QNLSSKVRTNLRKQVVTQLTKNEIFKRIDKKELIQSDLIDFVKNEPDAN |
| | | EKIALISEFRNFTVYFKGFHENRRNMYSDEEKSTSIAFRLIHENLPKFI |
| | | DNMEVFAKIQNTSISENFDAIQKELCPELVTLCEMEKLGYENKTLSQKQ |
| | | IDAYNTVIGGKTTSEGKKIKGLNEYINLYNQQHKQEKLPKMKLLFKQIL |
| | | SDRESASWLLEKFENDSQVVGAMVNFWNTIHDTVLAEGGLKTIIASLGS |
| | | YGLEGIFLKNDLQLTDISQKATGSWSKISSEIKQKIEAMNPQKKKESYE |
| | | SYQERIDKLFKSYKSFSLAFVNECLRGEYKIEDYFLKLGAVNSSLLQKE |
| | | NHFSHILNTYTDVKEVIGFYSESTDTKLIQDNDSIQKIKQFLDAVKDLQ |
| | | AYVKPLLGNSDETGKDERFYGDLIEYWSLLDLITPLYNMVRNYVTQKPY |
| | | SVDKIKINFQNPTLLNGWDLNKEMDNTSVILRRDGKYYLAIMNNKSRKV |
| | | FLKYPSGTDRNCYEKMEYKLLPGANKMLPKVFFSKSRINEFMPNERLLS |
| | | NYEKGTHKKSGTCFSLDDCHTLIDFFKKSLNKHEDWKNFGFKFSDTSTY |
| | | EDMSGFYKEVENQGYKLSFKPIDATYVDQLVDEGKIFLFQIYNKDFSEH |
| | | SKGTPNMHTLYWKMLFDETNLGDVVYKLNGEAEVFFRKASINVSHPTHP |
| | | ANIPIKKKNLKHKDEERILKYDLIKDKRYTVDQFQFHVPITMNFKANGN |
| | | GNINQKAIDYLRSASDTHIIGIDRGERNLLYLVVIDGNGKICEQFSLNE |
| | | IEVEYNGEKYSTNYHDLLNVKENERKQARQSWQSIANIKDLKEGYLSQV |
| | | IHKISELMVKYNAIVVLEDLNAGFMRGRQKVEKQVYQKFEKKLIEKLNY |
| | | LVFKKQSSDLPGGLMHAYQLANKFESFNTLGKQSGFLFYIPAWNTSKMD |
| | | PVTGFVNLEDVKYESVDKAKSFFSKEDSIRYNVERDMFEWKENYDEFTK |
| | | KAEGTKTDWTVCSYGNRIITFRNPDKNSQWDNKEINLTENIKLLFERFG |
| | | IDLSSNLKDEIMERTEKEFFIELISLFKLVLQMRNSWTGTDIDYLVSPV |
| | | CNENGEFFDSRNVDETLPQNADANGAYNIARKGMILLDKIKKNNGEKKL |
| | | TLSITNREWLSFAQGCCKNG |
| ART22 | 22 | MLFQDFTHLYPLSKTVRFELKPIGKTLEHIHAKNFLSQDKTMADMYQKV |
| | | KAILDDYHRDFIADMMGEVKLTKLAEFCDVYLKERKNPKDDGLQKQLKD |
| | | LQAVLRKEIVKPIGNGGKYKVGYDRLFGAKLFKDGKELGDLAKEVIAQE |
| | | SESSPKLPQIAHFEKFSTYFTGFHDNRKNMYSSDDKHTAIAYRLIHENL |
| | | PRFIDNLQILATIKQKHSALYDQIASELTASGLDVSLASHLGGYHKLLT |
| | | QEGITAYNRIIGEVNSYTNKHNQICHKSERIAKLRPLHKQILSDGMGVS |
| | | FLPSKFADDSEMCQAVNEFYRHYADVFAKVQSLEDREDDYQKDGIYVEH |
| | | KNLNELSKRAFGDFGFLKRFLEEYYADVIDPEFNEKFAKTEPDSDEQKK |
| | | LAGEKDKFVKGVHSLASLEQVIEYYTAGYDDESVQADKLGQYFKHRLAG |
| | | VDNPIQKIHNSHSTIKGFLERERPAGERALPKIKSDKSPEMTQLRQLKE |
| | | LLDNALNVVHFAKLVSTETVLDTRSDKFYGEFRPLYVELAKITTLYNKV |
| | | RDYLSQKPFSTEKYKLNFGNPTLLNGWDLNKEKDNFGVILQKDGCYYLA |
| | | LLDKAHKKVFDNAPNTGKSVYQKMVYKQIANARRDLACLLIINGKVVRK |
| | | TKGLDDLREKYLPYDIYKIYQSESYKVLSPNFNHQDLVKYIDYNKILAS |
| | | GYFEYFDFRFKESSEYKSYKEFLDDVDNCGYKISFCNINADYIDELVEQ |
| | | GQLYLFQIYNKDFSPKAHGKPNLHTLYFKALFSEDNLANPIYKLNGEAQ |
| | | IFYRKASLDMNETTIHRAGEVLENKNPDNPKQRQFVYDIIKDKRYTQDK |
| | | FMLHVPITMNFGVQGMTIEGENKKVNQSIQQYDDVNVIGIDRGERHLLY |
| | | LTVINSKGEILEQRSLNDIITTSANGTQMTTPYHKILNKKKEGRLQARK |
| | | DWGEIETIKELKAGYLSHVVHQISQLMLKYNAIVVLEDLNFGFKRGRLK |
| | | VENQVYQNFENALIKKLNHLVLKDKTDDEIGSYKNALQLTNNFTDLKSI |
| | | GKQTGFLFYVPARNTSKIDPETGFVDLLKPRYENITQSQAFFGKEDKIC |
| | | YNTDKGYFEFHIDYAKFTDEAKNSRQTWVICSHGDKRYVYNKTANQNKG |
| | | ATKGINVNDELKSLFACHHINDKQPNLVMDICQNNDKEFHKSLMYLLKA |
| | | LLALRYSNANSDEDFILSPVANDEGVFFNSALADDTQPQNADANGAYHI |
| | | ALKGLWVLEQIKNSDDLDKVDLEIKDDEWRNFAQNR |
| ART23 | 23 | MGKNQNFQEFIGVSPLQKTLRNELIPTETTKKNITQLDLLTEDEIRAQN |
| | | REKLKEMMDDYYRDVIDSTLHAGIAVDWSYLFSCMRNHLRENSKESKRE |
| | | LERTQDSIRSQIYNKFAERADFKDMFGASIITKLLPTYIKQNPEYSERY |
| | | DESMEILKLYGKFTTSLTDYFETRKNIFSKEKISSAVGYRIVEENAEIF |
| | | LQNQNAYDRICKIAGLDLHGLDNEITAYVDGKTLKEVCSDEGFAKAITQ |
| | | EGIDRYNEAIGAVNQYMNLLCQKNKALKPGQFKMKRLHKQILCKGTTSF |
| | | DIPKKFENDKQVYDAVNSFTEIVMKNNDLKRLLNITQNVNDYDMNKIYV |
| | | AADAYSTISQFISKKWNLIEECLLDYYSDNLPGKGNAKENKVKKAVKEE |
| | | TYRSVSQLNELIEKYYVEKTGQSVWKVESYISRLAETITLELCHEIEND |
| | | EKHNLIEDDDKISKIKELLDMYMDAFHIIKVERVNEVLNFDETFYSEMD |
| | | EIYQDMQEIVPLYNHVRNYVTQKPYKQEKYRLYENTPTLANGWSKNKEY |
| | | DNNAIILMRDDKYYLGILNAKKKPSKQTMAGKEDCLEHAYAKMNYYLLP |
| | | GANKMLPKVFLSKKGIQDYHPSSYIVEGYNEKKHIKGSKNFDIRFCRDL |
| | | IDYFKECIKKHPDWNKENFEFSATETYEDISVFYREVEKQGYRVEWTYI |
| | | NSEDIQKLEEDGQLFLFQIYNKDFAVGSTGKPNLHTLYLKNLFSEENLR |
| | | DIVLKLNGEAEIFFRKSSVQKPVIHKCGSILVNRTYEITESGTTRVQSI |
| | | PESEYMELYRYENSEKQIELSDEAKKYLDKVQCNKAKTDIVKDYRYTMD |
| | | KFFIHLPITINFKVDKGNNVNAIAQQYIAEQEDLHVIGIDRGERNLIYV |
| | | SVIDMYGRILEQKSFNLVEQVSSQGTKRYYDYKEKLQNREEERDKARKS |
| | | WKTIGKIKELKEGYLSSVIHEIAQMVVKYNAIIAMEDLNYGFKRGRFKV |
| | | ERQVYQKFETMLISKLNYLADKSQAVDEPGGILRGYQMTYVPDNIKNVG |
| | | RQCGIIFYVPAAYTSKIDPTTGFINAFKRDVVSTNDAKENFLMKEDSIQ |
| | | YDIEKGLFKFSFDYKNFATHKLTLAKTKWDVYINGTRIQNMKVEGHWLS |
| | | MEVELTTKMKELLDDSHIPYEEGQNILDDLREMKDITTIVNGILEIFWL |
| | | TVQLRNSRIDNPDYDRIISPVLNNDGEFFDSDEYNSYIDAQKAPLPIDA |
| | | DANGAFCIALKGMYTANQIKENWVEGEKLPADCLKIEHASWLAFMQGER |
| | | G |
| ART24 | 24 | MNTSLFSSFTRQYPVTKTLRFELKPMGATLGHIQQKGFLHKDEELAKIY |
| | | KKIKELLDEYHRAFIADTLGDAQLVGLDDFYADYQALKQDSKNSHLKDK |
| | | LTKTQDNLRKQITKNFEKTPQLKERYKRLFTKELFKAGKDKGDLEKWLI |
| | | NHDSEPNKAEKISWIHQFENFTTYFQGFYENRKNMYSDEVKHTAIAYRL |
| | | IHENLPRFVDNIQVLSKIKSDYPDLYHELNHLDSRTIDFADEKEDDMLQ |
| | | MDFYHHLLIQSGITAYNTLLGGKVLEGGKKLQGINELINLYGQKHKIKI |
| | | AKLKPLHKQILSDGQSVSFLPKKFDNDYELCQTVNHFYREYVAIFDELV |
| | | VLFQKFYDYDKDNIYINHQQLNQLSHELFADERLLSRALDFYYCQIIDG |
| | | DENNKINNAKSQNAKEKLLKEKERYTKSNHSINELQKAINHYASHHEDT |
| | | EVKVISDYFSATNIRNMIDGIHHHESTIKGFLEKDNNQGESYLPKQKNS |
| | | NDVKNLKLFLDGVLRLIHFIKPLALKSDDTLEKEEHFYGEFMPLYDKLV |
| | | MFTLLYNKVRDYISQKPYNDEKIKLNFGNSTLLNGWDVNKEKDNFGVIL |
| | | CKEGLYYLAILDKSHKKVEDNAPKATSSHTYQKMVYKLLPGPNKMLPKV |
| | | FFAKSNIGYYQPSAQLLENYEKGTHKKGSNFSLTDCHHLIDFFKSSIAK |
| | | HPEWKEFGFRFSDTHTYQDLSDFYKEIEPQSYKVKFIDIDADYIDDLVE |
| | | KGQLYLFQLYNKDFSKQSYGKPNLHTLYFKSLFSDDNLKNPIYKLNGEA |
| | | EIFYRRASLSVSDTTIHQAGEILTPKNPNNTHNRTLSYDVIKNKRYTTD |
| | | KFFLHIPITMNFGIENTGFKAFNHQVNTTLKNADKKDVHIIGIDRGERH |
| | | LLYVSVIDGDGRIVEQRTLNDIVSISNNGMSMSTPYHQILDNREKERLA |
| | | ARTDWGDIKNIKELKAGYLSHVVHEVVQMMLKYNAMIVLEDLNFGFKHG |
| | | RFKVEKQVYQNFENALIKKLNYLVLKNADNHQLGSVRKALQLTNNETDI |
| | | KSIGKQTGFIFYVPAWNTSKIDPTTGFVDLLKPRYENMAQAQSFISREK |
| | | KIAYNHQLDYFEFEFDYADFYQKTIDKKRIWTLCTYGDVRYYYDHKTKE |
| | | TKTVNITKELKSLLDKHDLSYQNGHNLVDELANSHDKSLLSGVMYLLKV |
| | | LLALRYSHAQKNEDFILSPVMNKDGVFFDSRFADDVLPNNADANGAYHI |
| | | ALKGLWVLNQIQSADNMDKIDLSISNEQWLHFTQSR |
| ART25 | 25 | MVGNKISNSFDSFTGINALSKTLRNELIPSDYTKRHIAESDFIAADTNK |
| | | NEDQYVAKEMMDDYYRDFISKVLDNLHDIEWKNLFELMHKAKIDKSDAT |
| | | SKELIKIQDMLRKKIGKKESQDPEYKVMLSAGMITKILPKYILEKYETD |
| | | REDRLEAIKRFYGFTVYFKEFWASRQNVESDKAIASSISYRIIHENAKI |
| | | YMDNLDAYNRIKQIACEEIEKIEEEAYDFLQGDQLDVVYTEEAYGRFIS |
| | | QSGIDLYNNICGVINAHMNLYCQSKKCSRSKFKMQKLHKQILCKAETGF |
| | | EIPLGFQDDAQVINAINSFNALIKEKNIISRLRTIGKSISLYDVNKIYI |
| | | SSKAFENVSVYIDHKWDVIASSLYKYFSEIVKGNKDNREEKIQKEIKKV |
| | | KSCSLGDLQRLVNSYYKIDSTCLEHEVTEFVTKIIDEIDNFQITDEKEN |
| | | DKISLIQNEQIVMDIKTYLDKYMSIYHWMKSFVIDELVDKDMEFYSELD |
| | | ELNEDMSEIVNLYNKVRNYVTQKPYSQEKIKLNFGSPTLADGWSKSKEF |
| | | DNNAIILIRDEKIYLAIFNPRNKPAKTVISGHDVCNSETDYKKMNYYLL |
| | | PGASKTLPHVFIKSRLWNESHGIPDEILRGYELGKHLKSSVNFDVEFCW |
| | | KLIDYYKECISCYPNYKAYNFKFADTESYNDISEFYREVECQGYKIDWT |
| | | YISSEDVEQLDRDGQIYLFQIYNKDFAPNSKGMDNLHTKYLKNIFSEDN |
| | | LKNIVIKLNGEAELFYRKSSVKKKVEHKKGTILVNKTYKVEDNTENSKE |
| | | KRVIIESVPDDCYMELVDYWRNGGIGILSDKAVQYKDKVSHYEATMDIV |
| | | KDRRYTVDKFFIHLPITINFKADGRININEKVLKYIAENDELHVIGIDR |
| | | GERNLLYVSVINKKGKIVEQKSFNMIESYETVTNIVRRYNYKDKLVNKE |
| | | SARTDARKNWKEIGKIKEIKEGYLSQVIHEISKMVLKYNAIIVMEDLNY |
| | | GFKRGRFRVERQVYQKFENMLISKLAYLVDKSRKADEPGGVLRGYQLTY |
| | | IPDSLEKLGSQCGIIFYVPAAYTSKIDPLTGFVNVENFREYSNFETKLD |
| | | FVRSLDSIRYDTEKKLFSISFDYDNFKTHNTTLAKTKWVIYLRGERIKK |
| | | EHTSYGWKDDVWNVESRIKDLFDSSHMKYDDGHNLIEDILELESSVQKK |
| | | LINELIEIIRLTVQLRNSKSERYDRTEAEYDRIVSPVMDENGRFYDSEN |
| | | YIFNEETELPKDADANGAYCIALKGLYNVIAIKNNWKEGEKFNRKLLSL |
| | | NNYNWEDFIQNRRF |
| ART26 | 26 | MVGNKISNSFDSFTGINALSKTLRNELIPSDYTKRHIAESDFIAADINK |
| | | NEDQYVAKEMMDDYYRDFISKVLDNLHDIEWKNLFELMHKAKIDKSDAT |
| | | SKELIKIQDMLRKKIGKKFSQDPEYKVMLSAGMITKILPKYILEKYETD |
| | | REDRLEAIKRFYGFTVYFKEFWASRQNVESDKAIASSISYRIIHENAKI |
| | | YMDNLDAYNRIKQIACEEIEKIEEEAYDFLQGDQLDVVYTEEAYGRFIS |
| | | QSGIDLYNNICGVINAHMNLYCQSKKCSRSKFKMQKLHKQILCKAETGF |
| | | EIPLGFQDDAQVINAINSENALIKEKNIISRLRTIGKSISLYDVNKIYI |
| | | SSKAFENVSVYIDHKWDVIASSLYKYFSEIVKGNKDNREEKIQKEIKKV |
| | | KSCSLGDLQRLVNSYYKIDSTCLEHEVTEFVTKIIDEIDNFQITDEKEN |
| | | DKISLIQNEQIVMDIKTYLDKYMSIYHWMKSFVIDELVDKDMEFYSELD |
| | | ELNEDMSEIVNLYNKVRNYVTQKPYSQEKIKLNFGSPTLADGWSKSKEF |
| | | DNNAIILIRDEKIYLAIFNPRNKPAKTVISGHDVCNSETDYKKMNYYLL |
| | | PGASKTLPHVFIKSRLWNESHGIPDEILRGYELGKHLKSSVNEDVEFCW |
| | | KLIDYYKECISCYPNYKAYNFKFADTESYNDISEFYREVECQGYKIDWT |
| | | YISSEDVEQLDRDGQIYLFQIYNKDFAPNSKGMDNLHTKYLKNIFSEDN |
| | | LKNIVIKLNGEAELFYRKSSVKKKVEHKKGTILVNKTYKVEDNTENSKE |
| | | KRVIIESVPDDCYMELVDYWRNGGIGILSDKAVQYKDKVSHYEATMDIV |
| | | KDRRYTVDKFFIHLPITINFKADGRININEKVLKYIAENDELHVIGIDR |
| | | GERNLLYVSVINKKGKIVEQKSENMIESYETVTNIVRRYNYKDKLVNKE |
| | | SARTDARKNWKEIGKIKEIKEGYLSQVIHEISKMVLKYNAIIVMEDLNY |
| | | GFKRGRFRVERQVYQKFENMLISKLAYLVDKSRKADEPGGVLRGYQLTY |
| | | IPDSLEKLGSQCGIIFYVPAAYTSKIDPLTGFVNVENFREYSNFETKLD |
| | | FVRSLDSIRYDTEKKLFSISFDYDNFKTHNTTLAKTKWVIYLRGERIKK |
| | | EHTSYGWKDDVWNVESRIKDLFDSSHMKYDDGHNLIEDILELESSVQKK |
| | | LINELIEIIRLTVQLRNSKSERYDRTEAEYDRIVSPVMDENGRFYDSEN |
| | | YIFNEETELPKDADANGAYCIALKGLYNVIAIKNNWKEGEKFNRKLLSL |
| | | NNYNWFDFIQNRRFQIYLFQIYNKDFAPNSKGMDNLHTKYLKNIFSEDN |
| | | LKNIVIKLNGEAELFYRKSSVKKKVEHKKGTILVNKTYKVEDNTENSKE |
| | | KRVIIESVPDDCYMELVDYWRNGGIGILSDKAVQYKDKVSHYEATMDIV |
| | | KDRRYTVDKFFIHLPITINFKADGRININEKVLKYIAENDELHVIGIDR |
| | | GERNLLYVSVINKKGKIVEQKSENMIESYETVTNIVRRYNYKDKLVNKE |
| | | SARTDARKNWKEIGKIKEIKEGYLSQVIHEISKMVLKYNAIIVMEDLNY |
| | | GFKRGRFRVERQVYQKFENMLISKLAYLVDKSRKADEPGGVLRGYQLTY |
| | | IPDSLEKLGSQCGIIFYVPAAYTSKIDPLTGFVNVENFREYSNFETKLD |
| | | FVRSLDSIRYDTEKRLFSISFDYDNFKTHNTTLAKTKWVIYLRGERIKK |
| | | EHTSYGWKDDVWNVESRIKDLFDSSHMKYDDGHNLIEDILELESSVQKK |
| | | LINELIEIIRLTVQLRNSKSERYDRTEAEYDRIVSPVMDEKGRFYDSEN |
| | | YIFNEETELPKDADANGAYCIALKGLYNVIAIKNNWKEGEKENRKLLSL |
| | | NNYNWFDFIQNRRF |
| ART27 | 27 | MQEHKKISHLTHRNSVQKTIRMQLNPVGKTMDYFQAKQILENDEKLKED |
| | | YQKIKEIADRFYRNLNEDVLSKTGLDKLKDYAEIYYHCNTDADRKRLDE |
| | | CASELRKEIVKNFKNRDEYNKLENKKMIEIVLPQHLKNEDEKEVVASFK |
| | | NFTTYFTGFFTNRKNMYSDGEESTAIAYRCINENLPKHLDNVKAFEKAI |
| | | SKLSKNAVDDLDTTYSGLCGTNLYDVFTVDYFNFLLPQSGITEYNKIIG |
| | | GYTTSDGTKVKGINEYINLYNQQVSKRYKIPNLKILYKQILSESEKVSF |
| | | IPPKFEDDNELLSAVSEFYANDETFDGMPLKKAIDETKLLFGNLDNSSL |
| | | NGIYIQNDRSVINLSNSMFGSWSVIEDLWNKNYDSVNSNSRIKDIQKRE |
| | | DKRKKAYKAEKKLSLSFLQVLISNSENDEIREKSIVDYYKTSLMQLTDN |
| | | LSDKYKEAAPLFNESYANEKGLKNDDKSISLIKNFLDAIKEIEKFIKPL |
| | | SETNITGEKNDLFYSQFTPLLDNISRIDILYDKVRNYVTQKPFSTDKIK |
| | | LNFGNSQLLNGWDRNKEKDCGAVWLCKDEKYYLAIIDKSNNSILENIDF |
| | | QDCDESDCYEKIIYKLLPGPNKMLPKVFFSEKCKKLLSPSDEILKIRKN |
| | | GTFKKGDKFSLDDCHKLIDFYKESFKKYPNWLIYNFKFKKTNEYNDISE |
| | | FYNDVASQGYNISKMKIPTSFIDKLVDEGKIYLFQLYNKDFSPHSKGTP |
| | | NLHTLYFKMLFDERNLEDVVYKLNGEAEMFYRPASIKYDKPTHPKNTPI |
| | | KNKNTLNDKRASTFPYDLIKDKRYTKWQFSLHFPITMNFKAPDRAMIND |
| | | DVRNLLKSCNNNFIIGIDRGERNLLYVSIIDSNGAIIYQHSLNIIGNKF |
| | | KGKTYETNYREKLETREKERTEQRRNWKAIESIKELKEGYISQAVHVIC |
| | | QLVVKYDAIIVMEKLTDGFKRGRTKFEKQVYQKFEKMLIDKLNYYVDKK |
| | | LDPDEEGGLLHAYQLTNKLESFDKLGMQSGFIFYVRPDFTSKIDPVTGF |
| | | VNLLYPRYENIDKAKDMISREDDIRYNAGEDFFEFDIDYDKFPKTASDY |
| | | RKKWTICTNGERIEAFRNPASNNEWSYRTIILAEKFKELFDNNSINYRD |
| | | SDNLKAEILSQTKGKFFEDFFKLLRLTLQMRNSNPETGEDRILSPVKDK |
| | | NGNFYDSSKYDEKSNLPCDADANGAYNIARKGLWIVEQFKKSDNVSTVE |
| | | PVIHNDKWLKFVQENDMANN |
| ART28 | 28 | MKNLANFTNLYSLQKTLRFELKPIGKTLDWIIKKDLLKQDEILAEDYKI |
| | | VKKIIDRYHKDFIDLAFESAYLQKKSSDSFTAIMEASIQSYSELYFIKE |
| | | KSDRDKKAMEEISGIMRKEIVECFTGKYSEVVKKKFGNLFKKELIKEDL |
| | | LNFCEPDELPIIQKFADETTYFTGFHENRENMYSNEEKATAIANRLIRE |
| | | NLPRYLDNLRIIRSIQGRYKDFGWKDLESNLKRIDKNLQYSDELTENGF |
| | | VYTFSQKGIDRYNLILGGQSVESGEKIQGLNELINLYRQKNQLDRRQLP |
| | | NLKELYKQILSDRTRHSFVPEKFSSDKALLRSLLDFHKEVIQNKNLFEE |
| | | KQVSLLQAIRETLTDLKSFDLDRIYLINDTSLTQISNFVFGDWSKVKTI |
| | | LAIYFDENIANPKDRQRQSNSYLKAKENWLKKNYYSIHELNEAISVYGK |
| | | HSDEELPNTKIEDYFSGLQTKDETKKPIDVLDAIVSKYADLESLLTKEY |
| | | PEDKNLKSDKGSIEKIKNYLDSIKLLQNFLKPLKPKKVQDEKDLGFYND |
| | | LELYLESLESANSLYNKVRNYLTGKEYSDEKIKLNFKNSTLLDGWDENK |
| | | ETSNLSVIFRDINNYYLGILDKQNNRIFESIPEIQSGEETIQKMVYKLL |
| | | PGANNMLPKVFFSEKGLLKFNPSDEITSLYSEGRFKKGDKESINSLHTL |
| | | IDFYKKSLAVHEDWSVENFKFDETSHYEDISQFYRQVESQGYKITFKPI |
| | | SKKYIDTLVEDGKLYLFQIYNKDFSQNKKGGGKPNLHTIYFKSLFEKEN |
| | | LKDVIVKLNGQAEVFFRKKSIHYDENITRYGHHSELLKGRFSYPILKDK |
| | | RFTEDKFQFHFPITLNFKSGEIKQFNARVNSYLKHNKDVKIIGIDRGER |
| | | HLLYLSLIDQDGKILRQESLNLIKNDQNFKAINYQEKLHKKEIERDQAR |
| | | KSWGSIENIKELKEGYLSQVVHTISKLMVEHNAIVVLEDLNFGFKRGRQ |
| | | KVERQVYQKFEKMLIEKLNFLVFKDKEMDEPGGILKAYQLTDNFVSFEK |
| | | MGKQTGFVFYVPAWNTSKIDPKTGFVNFLHLNYENVNQAKELIGKEDQI |
| | | RYNQDRDWFEFQVTTDQFFTKENAPDTRTWIICSTPTKRFYSKRTVNGS |
| | | VSTIEIDVNQKLKELFNDCNYQDGEDLVDRILEKDSKDFFSKLIAYLRI |
| | | LTSLRQNNGEQGFEERDFILSPVVGSDGKFFNSLDASSQEPKDADANGA |
| | | YHIALKGLMNLHVINETDDESLGKPSWKISNKDWLNFVWQRPSLKA |
| ART29 | 29 | MQEHKKISHLTHRNSVQKTIRMQLNPVGKTMDYFQAKQILENDEKLKEN |
| | | YQKIKEIADRFYRNLNEDVLSKTRLDKLKDYTDIYYHCNTDADRKRLDE |
| | | CASELRKEIVKNFKNRDEYNKLENKKMIEIVLPKHLKNEDEKEVVTSFK |
| | | NFTTYFTGFFTNRKNMYSDGEESTAIAYRCINENLPKHLDNVKAFEKAI |
| | | SKLSKNAIDDLDTTYSGLCGTNLYDVFTVDYENFLLPQSGITEYNKIIG |
| | | GYTTNDGTKVKGINEYINLYNQQVSKRDKIPNLKILYKQILSESEKVSF |
| | | IPPKFEDDNELLSAVSEFYANDETFDGMPLKKAIDETKLLFGNLDNPSL |
| | | NGIYIQNDRSVTNLSNSMFGSWSVIEDLWNKNYDSVNSNSRIKDIQKRE |
| | | DKRKKAYKAEKKLSLSFLQVLISNSENDEIREKSIVDYYKTSLMQLTDN |
| | | LSDKYNEAAPLLNENYSNEKGLKNDDKSISLIKNFLDAIKEIEKFIKPL |
| | | SETNITGEKNDLFYSQFTPLLDNISRIDILYDKVRNYVTQKPFSTDKIK |
| | | LNFGNSQLLNGWDRNKEKDCGAVWLCKDEKYYLAIIDKSNNSILENIDE |
| | | QDCDESDCYEKIIYKLLPGPNKMLPKVFFSEKCKKLLSPSDEILKIYKS |
| | | GTFKTGDKFSLDDCHKLIDFYKESFKKYPNWLIYNFKFKKTNEYNDIRE |
| | | FYNDVALQGYNISKMKIPTSFIDKLVDEGKIYLFQLYNKDESPHSKGTP |
| | | NLHTLYFKMLFDERNLEDVVYRLNGEAEMFYRPASIKYDKPTHPKNTPI |
| | | KNKNTLNDKKTSTFPYDLIKDKRYTKWQFSLHFPITMNFKAPDKAMIND |
| | | DVRNLLKSCNNNFIIGIDRGERNLLYVSVIDSNGAIIYQHSLNIIGNKF |
| | | KEKTYETNYREKLATREKERTEQRRNWKAIESIKELKEGYISQAVHVIC |
| | | QLVVKYDAIIVMEKLTDGFKRGRTKFEKQVYQKFEKMLIDKLNYYVDKK |
| | | LDPDEEGGLLHAYQLTNKLESFDKLGMQSGFIFYVRPDFTSKIDPVTGF |
| | | VNLLYPQYENIDKAKDMISRFDEIRYNAGEDFFEFDIDYDEFPKTASDY |
| | | RKKWTICINGERIEAFRNPANNNEWSYRTIILAEKFKELFDNNSINYRD |
| | | SDDLKAEILSQTKGKFFEDFFKLLRLTLQMRNSNPETGEDRILSPVKDK |
| | | NGNFYDSSKYDEKSKLPCDADANGAYNIARKGLWIVEQFKKADNVSTVE |
| | | PVIHNDQWLKFVQENDMANN |
| ART30 | 30 | MQEHKKISHLTHRNSVQKTIRMQLNPVGKTMDYFQAKQILENDEKLKED |
| | | YQKIKEIADRFYRNLNEDVLSKTGLDKLKDYADIYYHCNTDADRKRLNE |
| | | CASELRKEIVKNFKNRDEYNKLFNKKMIEIVLPKHLKNEDEKEVVASFK |
| | | NFTTYFTGFFTNRKNMYSDGEESTAIAYRCINENLPKHLDNVKVFEKAI |
| | | SKLSKNAIDDLGATYSGLCGTNLYDVFTVDYFNFLLPQSGITEYNKIIG |
| | | GYTTSDGTKVKGINEYINLYNQQVSKRDKIPNLKILYKQILSESEKVSF |
| | | IPPKFEDDNELLSAVSEFYANDETFDGMPLKKAIDETKLLFGNLDNSSL |
| | | NGIYIQNDRSVINLSNSMFGSWSVIEDLWNKNYDSVNSNSRIKDIQKRE |
| | | DKRKKAYKAEKKLSLSFLQVLISNSENDEIREKSIVDYYKTSLMQLTDN |
| | | LSDKYKEAAPLFSENYDNEKGLKNDDKSISLIKNFLDAIKEIEKFIKPL |
| | | SETNITGEKNDLFYSQFTPLLDNISRIDILYDKVRNYVTQKPFSTDKIK |
| | | LNFGNSQLLNGWDKDKEREYGAVLLCKDEKYYLAIIDKSNNSILENIDF |
| | | QDCNESDYYEKIVYKLLTKINGNLPRVFFSEKRKKLLSPSDEILKIYKS |
| | | GTFKKGDKFSLDDCHKLIDFYKESFKKYPNWLIYNFKFKNTNEYNDISE |
| | | FYNDVASQGYNISKMKIPTTFIDKLVDEGKIYLFQLYNKDFSPHSKGTP |
| | | NLHTLYFKMLFDERNLEDVVYKLNGEAEMFYRPASIKYDKPTHPKNTPI |
| | | KNKNTLNDKKASTFPYDLIKDKRYTKWQFSLHFPITMNFKAPDKAMIND |
| | | DVRNLLKSCNNNFIIGIDRGERNLLYVSVIDSNGAIIYQHSLNIIGNKF |
| | | KGKTYETNYREKLATREKDRTEQRRNWKAIESIKELKEGYISQAVHVIC |
| | | QLVVKYDAIIVMEKLTDGFKRGRTKFEKQVYQKFEKMLIDKLNYYVDKK |
| | | LDPDEEGGLLHAYQLTNKLESFDKLGTQSGFIFYVRPDFTSKIDPVTGF |
| | | VNLLYPRYENIDKAKDMISREDDIRYNAGEDFFEFDIDYDKFPKTASDY |
| | | RKKWTICTNGERIEAFRNPANNNEWSYRTIILAEKFKELFDNNSINYRD |
| | | SDDLKAEILSQTKGKFFEDFFKLLRLTLQMRNSNPETGEDRILSPVKDK |
| | | NGNFYDSSKYDEKSKLPCDADANGAYNIARKGLWIVEQFKKADNVSTVE |
| | | PVIHNDKWLKFVQENDMANN |
| ART31 | 31 | MQERKKISHLTHRNSVKKTIRMQLNPVGKTMDYFQAKQILENDEKLKEN |
| | | YQKIKEIADRFYRNLNEDVLSKTGLDKLKDYAEIYYHCNTDADRKRLNK |
| | | CASELRKEIVKNFKNRDEYNKLFDKRMIEIVLPKHLKNEDEKEVVASFK |
| | | NFTTYFTGFFTNRKNMYSDGEESTAIAYRCINENLPKHLDNVKAFEKAI |
| | | SKLSKNAIDDLDAYSGLCGTNLYDVFTVDYENFLLPQSGITEYNKIIGG |
| | | YTTNDGTKVKGINEYINLYNQQVSKRDKIPNLQILYKQILSESEKVSFI |
| | | PPKFEDDNELLSAVSEFYANDETFDGMPLKKAIDETKLLFGNLDNSSLN |
| | | GIYIQNDRSVINLSNSMFGSWSVIEDLWNKNYDSVNSNSRIKDIQKRED |
| | | KRKKAYKAEKKLSLSFLQVLISNSENDEIRKKSIVDYYKTSLMQLTDNL |
| | | SDKYNEAAPLLNENYSNEKGLKNDDKSISLIKNFLDAIKEIEKFIKPLS |
| | | ETNITGEKNDLFYSQFTPLLDNISRIDILYDKVRNYVTQKPFSTDKIKL |
| | | NFGNYQLLNGWDKDKEREYGAVLLCKDEKYYLAIIDKSNNRILENIDFQ |
| | | DCDESDCYEKIIYKLLPTPNKMLPKVFFAKKHKKLLSPSDEILKIYKNG |
| | | TFKKGDKFSLDDCHKLIDFYKESFKKYPKWLIYNFKFKKTNGYNDIREF |
| | | YNDVALQGYNISKMKIPTSFIDKLVDEGKIYLFQLYNKDFSPHSKGTPN |
| | | LHTLYFKMLFDERNLEDVVYRLNGEAEMFYRPASIKYDKPTHPKNTPIK |
| | | NKNTLNDKRASTFPYDLIKDKRYTKWQFSLHFPITMNFKDPDKAMINDD |
| | | VRNLLKSCNNNFIIGIDRGERNLLYVSVINSNGAIIYQHSLNIIGNKFK |
| | | GKTYETNYREKLATREKDRTEQRRNWKAIESIKELKEGYISQAVHVICQ |
| | | LVVKYDAIIVMEKLTDGFKRGRTKFEKQVYQKFEKMLIDKLNYYVDKKL |
| | | DPDEEGGLLHAYQLTNKLESFDKLGTQSGFIFYVRPDFTSKIDPVTGFV |
| | | NLLYPRYEKIDKAKDMISRFDDIRYNAGEDFFEFDIDYDKFPKTASDYR |
| | | KKWTICINGERIEAFRNPANNNEWSYRTIILAEKFKELEDNNSINYRDS |
| | | DDLKAEILSQTKGKFFEDFFKLLRLTLQMRNSNPETGEDRILSPVKDKN |
| | | GNFYDSSKYDEKSKLPCDADANGAYNIARKGLWIVEQFKKADNVSTVEP |
| | | VIHNDKWLKFVQENDMANN |
| ART32 | 32 | KTGLDKLKDYAEIYYHCNTDADRKRLNKCASELRKEIVKNFKNRDEYNK |
| | | LFDKRMIEIVLPKHLKNEDEKEVVASFKNFTTYFTGFFTNRKNMYSDGE |
| | | ESTAIAYRCINENLPKHLDNVKAFEKAISKLSKNAIDDLDATYSGLCGT |
| | | NLYDVFTVDYFNFLLPQSGITEYNKIIGGYTTSDGTKVKGINEYINLYN |
| | | QQVSKRDKIPNLQILYKQILSESEKVSFIPPKFEDDNELLSAVSEFYAN |
| | | DETFDEMPLKKAIDETKLLFGNLDNSSLNGIYIQNDRSVINLSNSMEGS |
| | | WSVIEDLWNKNYDSVNSNSRIKDIQKREDKRKKAYKAEKKLSLSFLQVL |
| | | ISNSENNEIREKSIVDYYKTSLMQLTDNLSDKYNEVAPLLNENYSNEKG |
| | | LKNDDKSISLIKNFLDAIKEIEKFIKPLSETNITGEKNDLFYSQFTPLL |
| | | DNISRIDILYDKVRNYVTQKPFSTDKIKLNFGNYQLLNGWDKDKEREYG |
| | | AVLLCRDEKYYLAIIDKSNNRILENIDFQDCDESDCYEKIIYKLLPTPN |
| | | KMLPKVFFAKKHKKLLSPSDEILKIRKNGTFKKGDKFSLDDCHKLIDFY |
| | | KESFKKYPNWLIYNFKFKKTNEYNDIREFYNDVALQGYNISKMKIPTSF |
| | | IDKLVDEGKIYLFQLYNKDFSPHSKGTPNLHTLYFKMLFDERNLEDVVY |
| | | KLNGEAKMFYRPASIKYDKPTHPKNTPIKNKNTLNDKKASTFPYDLIKD |
| | | KRYTKWQFSLHFSITMNFKAPDKAMINDDVRNLLKSCNNNFIIGIDRGE |
| | | RNLLYVSVIDSNGAIIYQHSLNIIGNKFKGKTYETNYREKLATREKERT |
| | | EQRRNWKAIESIKELKEGYISQAVHVICQLVVKYDAIIVMEKLTDGEKR |
| | | GRTKFEKQVYQKFEKMLIDKLNYYVDKKLDPDEEGGLLHAYQLTNKLES |
| | | FDKLGTQSGFIFYVRPDFTSKIDPVTGFVNLLYPRYENIDKAKDMISRF |
| | | DDIRYNAGEDFFEFDIDYDKFPKTASDYRKKWTICTNGERIEAFRNPAN |
| | | NNEWSYRTIILAEKFKELFDNNSINYRDSDDLKAEILSQTKGKFFEDFF |
| | | KLLRLTLQMRNSNPETGEDRILSPVKDKNGNFYDSSKYDEKSKLPCDAD |
| | | ANGAYNIARKGLWIVEQFKKSDNVSTVEPVIHNDKWLKFVQENDMANN |
| ART33 | 33 | MSININKFSDECRKIDFFTDLYNIQKTLRFSLIPIGATADNFEFKGRLS |
| | | KEKDLLDSAKRIKEYISKYLADESDICLSQPVKLKHLDEYYELYITKDR |
| | | DEQKFKSVEEKLRKELADLLKEILKRLNKKILSDYLPEYLEDDEKALED |
| | | IANLSSFSTYFNSYYDNCKNMYTDKEQSTAIPYRCINDNLPKFIDNMKA |
| | | YEKALEELKPSDLEELRNNFKGVYDTTVDDMFTLDYFNCVLSQSGIDSY |
| | | NAIIGNDKVKGINEYINLHNQTAEQGHKVPNLKRLYKQIGSQKKTISFL |
| | | PSKFESDNELLKAVYDFYNTGDAEKNFTALKDTITEFEKIFDNLSEYNL |
| | | DGVFVRNDISLTNLSQSMFNDWSVFRNLWNDQYDKVNNPEKAKDIDKYN |
| | | DKRHKVYKKSESFSINQLQELIATTLEEDINSKKITDYFSCDFHRVTTE |
| | | VENKYQLVKDLLSSDYPKNKNLKTSEEDVALIKDELDSVKSLESFVKIL |
| | | TGTGKESGKDELFYGSFTKWFDQLRYIDKLYDKVRNYITEKPYSLDKIK |
| | | LSFDNPQFLGGWQHSKETDYSAQLFMKDGLYYLGVMDKETKREFKTQYN |
| | | TPENDSDTMVKIEYNQIPNPGRVIQNLMLVDGKIVKKNGRKNADGVNAV |
| | | LEELKNQYLPENINRIRKTESYKTTSNNENKDDLKAYLEYYIARTKEYY |
| | | CKYNFVFKSADEYGSFNEFVDDVNNQAYQITKVKVSEKQLLSLVEQGKL |
| | | YLFKIYNKDFSEYSKGKKNLHTMYFQMLEDDRNLENLVYKLQGGAEMFY |
| | | RPASIKKDSEFKHDANVEIIKRTCEDKVNDKDNPTDDEKAKYYSKFDYD |
| | | IVKNKRFTKDQFSLHLTLAMNCNQPDHYWLNNDVRELLKKSNKNHIIGI |
| | | DRGERNLIYVTIINSDGVIVDQINFNIIENSYNGKKYKTDYQKKLNQRE |
| | | EDRQKARKTWKTIETIKELKDGYISQVVHQICKLIVQYDAIVVMENING |
| | | GFKRGRTKVEKQVYQKFETMLINKLNYYVDKGTDYKECGGLLKAYQLTN |
| | | KFETFERIGKQSGIIFYVDPYLTSKIDPVTGFANLLYPKYETIPKTHNF |
| | | ISNIDDIRYNQSEDYFEFDIDYDKFPQGSYNYRKKWTICSYGNRIKYYK |
| | | DSRNKTASVVVDITEKFKETFTNAGIDFVNDNIKEKLLLVNSKELLKSF |
| | | MDTLKLTVQLRNSEINSDVDYIISPIKDRNGNFYYSENYKKSNNEVPSQ |
| | | PQDGDANGAYNIARKGLMIINKLKKADDVINNELLKISKKEWLEFAQKG |
| | | DLGE |
| ART34 | 34 | MKATSIWDNFTRKYSVSKTLRFELRPVGKTEENIVKKEIIDAEWISGKN |
| | | IPKGTDADRARDYKIVKKLLNQLHILFINQALSSENVKEFEKEDKKSKT |
| | | FVAWSDLLATHEDNWIQYTRDKSNSTVLKSLEKSKKDLYSKLGKLLNSK |
| | | ANAWKAEFISYHKIKSPDNIKIRLSASNVQILEGNTSDPIQLLKYQIEL |
| | | DNIKFLKDDGSEYTTKELADLLSTFEKFGTYESGFNQNRANVYDIDGEI |
| | | STSIAYRLFNQNIEFFFQNIKRWEQFTSSIGHKEAKENLKLVQWDIQSK |
| | | LKELDMEIVQPRFNLKFEKLLTPQSFIYLLNQEGIDAFNTVLGGIPAEV |
| | | KAEKKQGVNELINLTRQKLNEDKRKFPSLQIMYKQIMSERKINFIDQYE |
| | | DDVEMLKEIQEFSNDWNEKKKRHSASSKEIKESAIAYIQREFHETEDSL |
| | | EERATVKEDFYLSEKSIQNLSIDIFGGYNTIHNLWYTEVEGMLKSGERP |
| | | LTRVEKEKLKKQEYISFAQIERLISKHSQQYLDSTPKEANDRSLFKEKW |
| | | KKTFKNGFKVSEYTNLKLNELISEGETFQKIDQETGKETTIKIPGLFES |
| | | YENAILVESIKNQSLGTNKKESVPSIKEYLDSCLRLSKFIESFLVNSKD |
| | | LKEDQSLDGCSDFQNTLTQWLNEEFDVFILYNKVRNHVTKKPGNTDKIK |
| | | INFDNATLLDGWDVDKEAANFGFLLKKADNYYLGIADSSFNQDLKYFNE |
| | | GERLDEIEKNRKNLEKEESKNISKIDQEKVKKYKEVIDDLKAISNLNKG |
| | | RYSKAFYKQSKFTTLIPKCTTQLNEVIEHFKKEDTDYRIENKKFAKPFI |
| | | ITKEVFLLNNTVYDTATKKFTLKIGEDEDTKGLKKFQIGYYRATDDKKG |
| | | YESALRNWITFCIEFTKSYKSCLNYNYSSLKSVSEYKSLDEFYKDLNGI |
| | | GYTIDFVDISEEYINKKINEGKLYLFQIYNKDFSEKSKGKENLHTTYWK |
| | | LLFDSKNLEDVVIKLNGQAEVFFRPASIHEKEKITHFKNQEIQNKNPNA |
| | | VKKTSKFEYDIIKDNRFTKNKFLFHCPITLNFKADGNPYVNNEVQENIA |
| | | KNPNVNIIGIDRGEKHLLYFTVINQQGQILDAGSLNSIKSEYKDKNQQS |
| | | VSFETPYHKILDKKESERKEARESWQEIENIKELKAGYLSHVVHQLSNL |
| | | IVKYNAIVVLEDLNKGFKRGRFKVEKQVYQKFEKSLIEKLNYLVEKDRK |
| | | ESNEPGHHLNAYQLTNKELSFERLGKQSGVLFYATASYTSKVDPVTGFM |
| | | QNIYDPYHKEKTREFYKNFTKIVYNGNYFEFNYDLNSVKPDSEEKRYRT |
| | | NWTVCSCVIRSEYDSNSKTQKTYNVNDQLVKLFEDAKIKIENGNDLKST |
| | | ILEQDDKFIRDLHFYFIAIQKMRVVDSKIEKGEDSNDYIQSPVYPFYCS |
| | | KEIQPNKKGFYELPSNGDSNGAYNIARKGIVILDKIRLRVQIEKLFEDG |
| | | TKIDWQKLPNLISKVKDKKLLMTVFEEWAELTHQGEVQQGDLLGKKMSK |
| | | KGEQFAEFIKGLNVTKEDWEIYTQNEKVVQKQIKTWKLESNST |
| ART35 | 35 | MKAINEYYKQLGAYCREEGKEKDDFFKRIDGAYCAISHLFFGEHGEIAQ |
| | | SDSDVELIQKLLEAYKGLQRFIKPLLGHGDEADKDNEFDAKLRKVWDEL |
| | | DIITPLYDKVRNWLSRKIYNPEKIKLCFENNGKLLSGWVDSRTKSDNGT |
| | | QYGGYIFRKKNEIGEYDFYLGISADTKLFRRDAAISYDDGMYERLDYYQ |
| | | LKSKTLLGNSYVGDYGLDSMNLLSAFKNAAVKFQFEKEVVPKDKENVPK |
| | | YLKRLKLDYAGFYQILMNDDKVVDAYKIMKQHILATLTSSIRVPAAIEL |
| | | ATQKELGIDELIDEIMNLPSKSFGYFPIVTAAIEEANKRENKPLFLFKM |
| | | SNKDLSYAATASKGLRKGRGTENLHSMYLKALLGMTQSVEDIGSGMVFF |
| | | RHQTKGLAETTARHKANEFVANKNKLNDKKKSIFGYEIVKNKRFTVDKY |
| | | LFKLSMNLNYSQPNNNKIDVNSKVREIISNGGIKNIIGIDRGERNLLYL |
| | | SLIDLKGNIVMQKSLNILKDDHNAKETDYKGLLTEREGENKEARRNWKK |
| | | IANIKDLKRGYLSQVVHIISKMMVEYNAIVVLEDLNPGFIRGRQKIERN |
| | | VYEQFERMLIDKLNFYVDKHKGANETGGLLHALQLTSEFKNFKKSEHQN |
| | | GCLFYIPAWNTSKIDPATGFVNLFNTKYTNAVEAQEFFSKEDEIRYNEE |
| | | KDWFEFEFDYDKFTQKAHGTRTKWTLCTYGMRLRSFKNSAKQYNWDSEV |
| | | VALTEEFKRILGEAGIDIHENLKDAICNLEGKSQKYLEPLMQFMKLLLQ |
| | | LRNSKAGTDEDYILSPVADENGIFYDSRSCGDQLPENADANGAYNIARK |
| | | GLMLIEQIKNAEDLNNVKFDISNKAWLNFAQQKPYKNGMKAINEYYKQL |
| | | GAYCREEGKEKDDFFKRIDGAYCAISHLFFGEHGEIAQSDSDVELIQKL |
| | | LEAYKGLQRFIKPLLGHGDEADKDNEFDAKLRKVWDELDIITPLYDKVR |
| | | NWLSRKIYNPEKIKLCFENNGKLLSGWVDSRTKSDNGTQYGGYIFRKKN |
| | | EIGEYDFYLGISADTKLFRRDAAISYDDGMYERLDYYQLKSKTLLGNSY |
| | | VGDYGLDSMNLLSAFKNAAVKFQFEKEVVPKDKENVPKYLKRLKLDYAG |
| | | FYQILMNDDKVVDAYKIMKQHILATLTSSIRVPAAIELATQKELGIDEL |
| | | IDEIMNLPSKSFGYFPIVTAAIEEANKRENKPLFLFKMSNKDLSYAATA |
| | | SKGLRKGRGTENLHSMYLKALLGMTQSVEDIGSGMVFFRHQTKGLAETT |
| | | ARHKANEFVANKNKLNDKKKSIFGYEIVKNKRFTVDKYLFKLSMNLNYS |
| | | QPNNNKIDVNSKVREIISNGGIKNIIGIDRGERNLLYLSLIDLKGNIVM |
| | | QKSLNILKDDHNAKETDYKGLLTEREGENKEARRNWKKIANIKDLKRGY |
| | | LSQVVHIISKMMVEYNAIVVLEDLNPGFIRGRQKIERNVYEQFERMLID |
| | | KLNFYVDKHKGANETGGLLHALQLTSEFKNFKKSEHQNGCLFYIPAWNT |
| | | SKIDPATGFVNLFNTKYTNAVEAQEFFSKFDEIRYNEEKDWFEFEFDYD |
| | | KFTQKAHGTRTKWTLCTYGMRLRSFKNSAKQYNWDSEVVALTEEFKRIL |
| | | GEAGIDIHENLKDAICNLEGKSQKYLEPLMQFMKLLLQLRNSKAGTDED |
| | | YILSPVADENGIFYDSRSCGDQLPENADANGAYNIARKGLMLIEQIKNA |
| | | EDLNNVKFDISNKAWLNFAQQKPYKNG |
| ART11* | 36 | MYYQGLTKLYPISKTIRNELIPVGKTLEHIRMNNILEADIQRKSDYERV |
| | | KKLMDDYHKQLINESLQDVHLSYVEEAADLYLNASKDKDIVDKESKCQD |
| | | KLRKEIVNLLKSHENFPKIGNKEIIKLLQSLSDTEKDYNALDSFSKFYT |
| | | YFTSYNEVRKNLYSDEEKSSTAAYRLINENLPKFLDNIKAYSIAKSAGV |
| | | RAKELTEEEQDCLEMTETFERTLTQDGIDNYNELIGKLNFAINLYNQQN |
| | | NKLKGFRKVPKMKELYKQILSEREASFVDEFVDDEALLTNVESFSAHIK |
| | | EFLESDSLSRFAEVLEESGGEMVYIKNDTSKTTFSNIVFGSWNVIDERL |
| | | AEEYDSANSKKKKDEKYYDKRHKELKKNKSYSVEKIVSLSTETEDVIGK |
| | | YIEKLQADIIAIKETREVFEKVVLKEHDKNKSLRKNTKAIEAIKSELDT |
| | | IKDFERDIKLISGSEHEMEKNLAVYAEQENILSSIRNVDSLYNMSRNYL |
| | | TQKPFSTEKFKLNFNRATLLNGWDKNKETDNLGILLVKEGKYYLGIMNT |
| | | KANKSFVNPPKPKTDNVYHKVNYKLLPGPNKMLPKVFFAKSNLEYYKPS |
| | | EDLLAKYQAGTHKKGENFSLEDCHSLISFFKDSLEKHPDWSEFGFKFSD |
| | | TKKYDDLSGFYREVEKQGYKITYTDIDVEYIDSLVEKDELYFFQIYNKD |
| | | FSPYSKGNYNLHTLYLTMLFDERNLRNVVYKLNGEAEVFYRPASIGKDE |
| | | LIIHKSGEEIKNKNPKRAIDKPTSTFEYDIVKDRRYTKDKFMLHIPVTM |
| | | NFGVDETRRENEVVNDAIRGDDKVRVIGIDRGERNLLYVVVVDSDGTIL |
| | | EQISLNSIINNEYSIETDYHKLLDEKEGDRDRARKNWTTIENIKELKEG |
| | | YLSQVVNVIAKLVLKYDAIICLEDLNFGFKRGRQKVEKQVYQKFEKMLI |
| | | DKLNYLVIDKSRSQENPEEVGHVLNALQLTSKFTSFKELGKQTGIIYYV |
| | | PAYLTSKIDPTTGFANLFYVKYESVEKSKDFFNREDSICENKVAGYFEF |
| | | SFDYKNFTDRACGMRSKWKVCTNGERIIKYRNEEKNSSFDDKVIVLTEE |
| | | FKKLFNEYGIAFNDCMDLTDAINAIDDASFFRKLTKLFQQTLQMRNSSA |
| | | DGSRDYIISPVENDNGEFFNSEKCDKSKPKDADANGAFNIARKGLWVLE |
| | | QLYNSSSGEKLNLAMTNAEWLEYAQQHTI |

[0154] In certain embodiments, a Cas nuclease comprises ABW1 (SEQ ID NO: 3), ABW2 (SEQ ID NO: 16), ABW3 (SEQ ID NO: 29), ABW4 (SEQ ID NO: 42), ABW5 (SEQ ID NO: 55), ABW6 (SEQ ID NO: 68), ABW7 (SEQ ID NO: 81), ABW8 (SEQ ID NO: 94), or ABW9 (SEQ ID NO: 107) (all SEQ ID NOs for ABW1-9 and variants thereof from International (PCT) Application Publication No. WO 2021/108324), or variants thereof, such as any one of variants 1-10 of ABW1 (SEQ ID NOs: 4-13, respectively), any one of variants 1-10 of ABW2 (SEQ ID NOs: 17-26, respectively), any one of variants 1-10 of ABW3 (SEQ ID NOs: 30-39, respectively), any one of variants 1-10 of ABW4 (SEQ ID NOs: 43-52, respectively), any one of variants 1-10 of ABW5 (SEQ ID NOs: 56-65, respectively), any one of variants 1-10 of ABW6 (SEQ ID NOs: 69-78, respectively), any one of variants 1-10 of ABW7 (SEQ ID NOs: 82-91, respectively), any one of variants 1-10 of ABW8 (SEQ ID NOs: 95-104, respectively), any one of variants 1-10 of ABW9 (SEQ ID NOs: 108-117, respectively). ABW1-ABW9, and variants thereof are known in the art and are described in International (PCT) Application Publication No. WO 2021/108324.

[0155] More type V-A Cas nucleases and their corresponding naturally occurring CRISPR-Cas systems can be identified by computational and experimental methods known in the art, e.g., as described in U.S. Pat. No. 9,790,490 and Shmakov et al. (2015) MOL. CELL, 60:385. Exemplary computational methods include analysis of putative Cas proteins by homology modeling, structural BLAST, PSI-BLAST, or HHPred, and analysis of putative CRISPR loci by identification of CRISPR arrays. Exemplary experimental methods include in vitro cleavage assays and in-cell nuclease assays (e.g., the Surveyor assay) as described in Zetsche et al. (2015) CELL, 163:759.

[0156] In certain embodiments, the Cas protein is a Cas nuclease that directs cleavage of one or both strands at the target locus, such as the target strand (i.e., the strand having the target nucleotide sequence that is at least partially complementary to and can hybridize with a single guide nucleic acid or dual guide nucleic acids) and/or the non-target strand. In certain embodiments, the Cas nuclease directs cleavage of one or both strands within about 1, 2, 3, 4, 5, 6, 7, 8, 9, 10, 15, 20, 25, 50, 100, 200, 500, or more nucleotides from the first or last nucleotide of the target nucleotide sequence or its complementary sequence. In certain embodiments, the cleavage is staggered, i.e., generating sticky ends. In certain embodiments, the cleavage generates a staggered cut with a 5′ overhang. In certain embodiments, the cleavage generates a staggered cut with a 5′ overhang of 1 to 5 nucleotides, e.g., of 4 or 5 nucleotides. In certain embodiments, the cleavage site is distant from the PAM, e.g., the cleavage occurs after the 18th nucleotide on the non-target strand and after the 23rd nucleotide on the target strand.

[0157] In certain embodiments, a composition provided herein comprises a Cas nuclease that a compatible guide nucleic acid (gNA), e.g., a gRNA, is capable of activating. In certain embodiments, a composition provided herein further comprises a Cas protein that is related to the Cas nuclease that a compatible guide nucleic acid (gNA), e.g., a gRNA, is capable of activating. For example, in certain embodiments, a Cas protein comprises an amino acid sequence at least 80% (e.g., at least 85%, at least 90%, at least 91%, at least 92%, at least 93%, at least 94%, at least 95%, at least 96%, at least 97%, at least 98%, or at least 99%) identical to the Cas nuclease amino acid sequence. In certain embodiments, a Cas protein comprises a nuclease-inactive mutant of the Cas nuclease. In certain embodiments, a Cas protein further comprises an effector domain.

[0158] In certain embodiments, a Cas protein lacks substantially all DNA cleavage activity. Such a Cas protein can be generated, e.g., by introducing one or more mutations to an active Cas nuclease (e.g., a naturally occurring Cas nuclease). A mutated Cas protein is considered to lack substantially all DNA cleavage activity when the DNA cleavage activity of the protein has no more than about 25%, 10%, 5%, 1%, 0.1%, 0.01%, or less of the DNA cleavage activity of the corresponding non-mutated form, for example, nil or negligible as compared with the non-mutated form. Thus, a Cas protein may comprise one or more mutations (e.g., a mutation in the RuvC domain of a type V-A Cas protein) and be used as a generic DNA binding protein with or without fusion to an effector domain. Exemplary mutations include D908A, E993A, and D1263A with reference to the amino acid positions in AsCpf1; D832A, E925A, and D1180A with reference to the amino acid positions in LbCpf1; and D917A, E1006A, and D1255A with reference to the amino acid position numbering of the FnCpf1. More mutations can be designed and generated according to the crystal structure described in Yamano et al. (2016) CELL, 165: 949.

[0159] It is understood that a Cas protein, rather than losing nuclease activity to cleave all DNA, may lose the ability to cleave only the target strand or only the non-target strand of a double-stranded DNA, thereby being functional as a nickase (see, Gao et al. (2016) CELL RES., 26:901). Accordingly, in certain embodiments, a Cas nuclease is a Cas nickase. In certain embodiments, a Cas nuclease has the activity to cleave the non-target strand but lacks substantially the activity to cleave the target strand, e.g., by a mutation in the Nuc domain. In certain embodiments, a Cas nuclease has the cleavage activity to cleave the target strand but lacks substantially the activity to cleave the non-target strand.

[0160] In certain embodiments, a Cas nuclease has the activity to cleave a double-stranded DNA and result in a double-strand break.

[0161] Cas proteins that lack substantially all DNA cleavage activity or have the ability to cleave only one strand may also be identified from naturally occurring systems. For example, certain naturally occurring CRISPR-Cas systems may retain the ability to bind the target nucleotide sequence but lose entire or partial DNA cleavage activity in eukaryotic (e.g., mammalian or human) cells. Such type V-A proteins are disclosed, for example, in Kim et al. (2017) ACS SYNTH. BIOL. 6 (7): 1273-82 and Zhang et al. (2017) CELL DISCOV. 3:17018.

[0162] The activity of a Cas protein (e.g., Cas nuclease) can be altered, e.g., by creating an engineered Cas protein. In certain embodiments, altered activity of an engineered Cas protein comprises increased targeting efficiency and/or decreased off-target binding. While not wishing to be bound by theory, it is hypothesized that off-target binding can be recognized by the Cas protein, for example, by the presence of one or more mismatches between the spacer sequence and the target nucleotide sequence, which may affect the stability and/or conformation of the CRISPR-Cas complex. In certain embodiments, altered activity comprises modified binding, e.g., increased binding to the target locus (e.g., the target strand or the non-target strand) and/or decreased binding to off-target loci. In certain embodiments, altered activity comprises altered charge in a region of the protein that associates with a single guide nucleic acid or dual guide nucleic acids. In certain embodiments, altered activity of an engineered Cas protein comprises altered charge in a region of the protein that associates with the target strand and/or the non-target strand. In certain embodiments, altered activity of an engineered Cas protein comprises altered charge in a region of the protein that associates with an off-target locus. The altered charge can include decreased positive charge, decreased negative charge, increased positive charge, or increased negative charge. For example, decreased negative charge and increased positive charge may generally strengthen binding to the nucleic acid(s) whereas decreased positive charge and increased negative charge may weaken binding to the nucleic acid(s). In certain embodiments, altered activity comprises increased or decreased steric hindrance between the protein and a single guide nucleic acid or dual guide nucleic acids. In certain embodiments, altered activity comprises increased or decreased steric hindrance between the protein and the target strand and/or the non-target strand. In certain embodiments, altered activity comprises increased or decreased steric hindrance between the protein and an off-target locus. In certain embodiments, a modification or mutation comprises one or more substitutions of Lys, His, Arg, Glu, Asp, Ser, Gly, and/or Thr. In certain embodiments, a modification or mutation comprises one or more substitutions with Gly, Ala, Ile, Glu, and/or Asp. In certain embodiments, modification or mutation comprises one or more amino acid substitutions in the groove between the WED and RuvC domain of the Cas protein (e.g., a type V-A Cas protein).

[0163] In certain embodiments, altered activity of an engineered Cas protein comprises increased nuclease activity to cleave the target locus. In certain embodiments, altered activity of an engineered Cas protein comprises decreased nuclease activity to cleave an off-target locus. In certain embodiments, altered activity of an engineered Cas protein comprises altered helicase kinetics. In certain embodiments, an engineered Cas protein comprises a modification that alters formation of the CRISPR complex.

[0164] In certain embodiments, a protospacer adjacent motif (PAM) or PAM-like motif directs binding of a Cas protein complex to a target locus. Many Cas proteins have PAM specificity. The precise sequence and length requirements for the PAM differ depending on the Cas protein used. PAM sequences are typically 2-5 base pairs in length and are adjacent to (but located on a different strand of target DNA from) the target nucleotide sequence. PAM sequences can be identified using any suitable method, such as testing cleavage, targeting, or modification of oligonucleotides having the target nucleotide sequence and different PAM sequences.

[0165] Exemplary PAM sequences are provided in Tables 2 and 3. In certain embodiments, a Cas protein comprises MAD7 and the PAM is TTTN, wherein N is A, C, G, or T. In certain embodiments, a Cas protein comprises MAD7 and the PAM is CTTN, wherein N is A, C, G, or T. In certain embodiments, a Cas protein comprises AsCpf1 and the PAM is TTTN, wherein N is A, C, G, or T. In certain embodiments, a Cas protein comprises FnCpf1 and the PAM is 5′ TTN, wherein N is A, C, G, or T. PAM sequences for certain other type V-A Cas proteins are disclosed in Zetsche et al. (2015) CELL, 163:759 and U.S. Pat. No. 9,982,279. Further, engineering of the PAM Interacting (PI) domain of a Cas protein may allow programing of PAM specificity, improve target site recognition fidelity, and/or increase the versatility of an engineered, non-naturally occurring system. Exemplary approaches to alter the PAM specificity of Cpf1 arc described in Gao et al. (2017) NAT. BIOTECHNOL., 35:789.

[0166] In certain embodiments, an engineered Cas protein comprises a modification that alters the Cas protein specificity in concert with modification to targeting range. Cas mutants can be designed to have increased target specificity as well as accommodating modifications in PAM recognition, for example by choosing mutations that alter PAM specificity (e.g., in the PI domain) and combining those mutations with groove mutations that increase (or if desired, decrease) specificity for the on-target locus versus off-target loci. The Cas modifications described herein can be used to counter loss of specificity resulting from alteration of PAM recognition, enhance gain of specificity resulting from alteration of PAM recognition, counter gain of specificity resulting from alteration of PAM recognition, or enhance loss of specificity resulting from alteration of PAM recognition.

[0167] In certain embodiments, an engineered Cas protein comprises one or more nuclear localization signal (NLS) motifs. In certain embodiments, an engineered Cas protein comprises at least 2 (e.g., at least 3, at least 4, at least 5, at least 6, at least 7, at least 8, at least 9, or at least 10) NLS motifs. Non-limiting examples of NLS motifs include: the NLS of SV40 large T-antigen, having the amino acid sequence of PKKKRKV (SEQ ID NO: 40); the NLS from nucleoplasmin, e.g., the nucleoplasmin bipartite NLS having the amino acid sequence of KRPAATKKAGQAKKKK (SEQ ID NO: 41); the c-myc NLS, having the amino acid sequence of PAAKRVKLD (SEQ ID NO: 42) or RQRRNELKRSP (SEQ ID NO: 43); the hRNPA1 M9 NLS, having the amino acid sequence of NQSSNFGPMKGGNFGGRSSGPYGGGGQYFAKPRNQGGY (SEQ ID NO: 44); the importin-a IBB domain NLS, having the amino acid sequence of RMRIZFKNKGKDTAELRRRRVEVSVELRKAKKDEQILKRRNV (SEQ ID NO: 45); the myoma T protein NLS, having the amino acid sequence of VSRKRPRP (SEQ ID NO: 46) or PPKKARED (SEQ ID NO: 47); the human p53 NLS, having the amino acid sequence of PQPKKKPL (SEQ ID NO: 48); the mouse c-abl IV NLS, having the amino acid sequence of SALIKKKKKMAP (SEQ ID NO: 49); the influenza virus NS1 NLS, having the amino acid sequence of DRLRR (SEQ ID NO: 50) or PKQKKRK (SEQ ID NO: 51); the hepatitis virus 8 antigen NLS, having the amino acid sequence of RKLKKKIKKL (SEQ ID NO: 52); the mouse Mx 1 protein NLS, having the amino acid sequence of REKKKFLKRR (SEQ ID NO: 53); the human poly (ADP-ribose) polymerase NLS, having the amino acid sequence of KRKGDEVDGVDEVAKKKSKK (SEQ ID NO: 54); the human glucocorticoid receptor NLS, having the amino acid sequence of RKCLQAGMNLEARKTKK (SEQ ID NO: 55), and synthetic NLS motifs such as PAAKKKKLD (SEQ ID NO: 56).

[0168] In general, the one or more NLS motifs are of sufficient strength to drive accumulation of the Cas protein in a detectable amount in the nucleus of a eukaryotic cell. The strength of nuclear localization activity may derive from the number of NLS motif(s) in the Cas protein, the particular NLS motif(s) used, the position(s) of the NLS motif(s), or a combination of these and/or other factors. In certain embodiments, an engineered Cas protein comprises at least 1 (e.g., at least 2, at least 3, at least 4, at least 5, at least 6, at least 7, at least 8, at least 9, or at least 10) NLS motif(s) at or near the N-terminus (e.g., within about 1, 2, 3, 4, 5, 10, 15, 20, 25, 30, 40, 50, or more amino acids along the polypeptide chain from the N-terminus). In certain embodiments, an engineered Cas protein comprises at least 1 (e.g., at least 2, at least 3, at least 4, at least 5, at least 6, at least 7, at least 8, at least 9, or at least 10) NLS motif(s) at or near the C-terminus (e.g., within about 1, 2, 3, 4, 5, 10, 15, 20, 25, 30, 40, 50, or more amino acids along the polypeptide chain from the C-terminus). In certain embodiments, an engineered Cas protein comprises at least 1 (e.g., at least 2, at least 3, at least 4, at least 5, at least 6, at least 7, at least 8, at least 9, or at least 10) NLS motif(s) at or near the C-terminus and at least 1 (e.g., at least 2, at least 3, at least 4, at least 5, at least 6, at least 7, at least 8, at least 9, or at least 10) NLS motif(s) at or near the N-terminus. In certain embodiments, the engineered Cas protein comprises one, two, or three NLS motifs at or near the C-terminus. In certain embodiments, the engineered Cas protein comprises one NLS motif at or near the N-terminus and one, two, or three NLS motifs at or near the C-terminus. In certain embodiments, the engineered Cas protein comprises a nucleoplasmin NLS at or near the C-terminus.

[0169] Detection of accumulation in the nucleus may be performed by any suitable technique. For example, a detectable marker may be fused to a nucleic acid-targeting protein, such that location within a cell may be visualized. Cell nuclei may also be isolated from cells, the contents of which may then be analyzed by any suitable process for detecting the protein, such as immunohistochemistry, Western blot, or enzyme activity assay. Accumulation in the nucleus may also be determined indirectly, such as by an assay that detects the effect of the nuclear import of a Cas protein complex (e.g., assay for DNA cleavage or mutation at the target locus, or assay for altered gene expression activity) as compared to a control not exposed to the Cas protein or exposed to a Cas protein lacking one or more of the NLS motifs.

[0170] A Cas protein may comprise a chimeric Cas protein, e.g., a Cas protein having enhanced function by being a chimera. Chimeric Cas proteins may be new Cas proteins containing fragments from more than one naturally occurring Cas protein or variants thereof. For example, fragments of multiple type V-A Cas homologs (e.g., orthologs) may be fused to form a chimeric Cas protein. In certain embodiments, a chimeric Cas protein comprises fragments of Cpf1 orthologs from multiple species and/or strains.

[0171] In certain embodiments, a Cas protein comprises one or more effector domains. The one or more effector domains may be located at or near the N-terminus of the Cas protein and/or at or near the C-terminus of the Cas protein. In certain embodiments, an effector domain comprised in the Cas protein is a transcriptional activation domain (e.g., VP64), a transcriptional repression domain (e.g., a KRAB domain or an SID domain), an exogenous nuclease domain (e.g., FokI), a deaminase domain (e.g., cytidine deaminase or adenine deaminase), or a reverse transcriptase domain (e.g., a high fidelity reverse transcriptase domain). Other activities of effector domains include but are not limited to methylase activity, demethylase activity, transcription release factor activity, translational initiation activity, translational activation activity, translational repression activity, histone modification (e.g., acetylation or demethylation) activity, single-stranded RNA cleavage activity, double-strand RNA cleavage activity, single-strand DNA cleavage activity, double-strand DNA cleavage activity, and nucleic acid binding activity.

[0172] In certain embodiments, a Cas protein comprises one or more protein domains that enhance homology-directed repair (HDR) and/or inhibit non-homologous end joining (NHEJ). Exemplary protein domains having such functions are described in Jayavaradhan et al. (2019) NAT. COMMUN. 10 (1): 2866 and Janssen et al. (2019) MOL. THER. NUCLEIC ACIDS 16:141-54. In certain embodiments, a Cas protein comprises a dominant negative version of p53-binding protein 1 (53BP1), for example, a fragment of 53BP1 comprising a minimum focus forming region (e.g., amino acids 1231-1644 of human 53BP1). In certain embodiments, a Cas protein comprises a motif that is targeted by APC-Cdh1, such as amino acids 1-110 of human Geminin, thereby resulting in degradation of the fusion protein during the HDR non-permissive G1 phase of the cell cycle.

[0173] In certain embodiments, a Cas protein comprises an inducible or controllable domain. Non-limiting examples of inducers or controllers include light, hormones, and small molecule drugs. In certain embodiments, a Cas protein comprises a light inducible or controllable domain. In certain embodiments, a Cas protein comprises a chemically inducible or controllable domain.

[0174] In certain embodiments, a Cas protein comprises a tag protein or peptide for ease of tracking and/or purification. Non-limiting examples of tag proteins and peptides include fluorescent proteins (e.g., green fluorescent protein (GFP), YFP, RFP, CFP, mCherry, tdTomato), HIS tags (e.g., 6×His tag (SEQ ID NO: 2044), or gly-6×His (SEQ ID NO: 2045); 8×His (SEQ ID NO: 2046), or gly-8×His (SEQ ID NO: 2047)), hemagglutinin (HA) tag, FLAG tag, 3×FLAG tag, and Myc tag.

[0175] In certain embodiments, a Cas protein is conjugated to a non-protein moiety, such as a fluorophore useful for genomic imaging. In certain embodiments, a Cas protein is covalently conjugated to the non-protein moiety. The terms “CRISPR-Associated protein,” “Cas protein,” “Cas,” “CRISPR-Associated nuclease,” and “Cas nuclease” are used herein to include such conjugates despite the presence of one or more non-protein moieties.

### B. Guide Nucleic Acids

[0176] A guide nucleic acid can be a single gNA (sgNA, e.g., sgRNA), in which the gNA is a single polynucleotide, or a dual gNA (e.g., dual gRNA), in which the gNA comprises two separate polynucleotides (these can in some cases be covalently linked, but not via a conventional internucleotide linkage). In certain embodiments, a single guide nucleic acid is capable of activating a Cas nuclease alone (e.g., in the absence of a tracrRNA).

[0177] In general, a gNA comprises a modulator nucleic acid and a targeter nucleic acid. In a sgNA the modulator and targeter nucleic acids are part of a single polynucleotide. In a dual gNA the modulator and targeter nucleic acids are separate, e.g., not joined by a conventional nucleotide linkage, such as not joined at all. The targeter nucleic acid comprises a spacer sequence and a targeter stem sequence. The modulator nucleic acid comprises a modulator stem sequence and, generally, further nucleotides, such as nucleotides comprising a 5′ tail. The modulator stem sequence and targeter stem sequence can each comprise any suitable number of nucleotides and are of sufficient complementarity that they can hybridize. In a single gNA there may be additional NTs between the targeter stem sequence and the modulator stem sequence; these can, in certain cases, form secondary structure, such as a loop.

[0178] In certain embodiments, the guide nucleic acid comprises a targeter nucleic acid that, in combination with a modulator nucleic acid, is capable of binding a Cas protein. In certain embodiments, the guide nucleic acid comprises a targeter nucleic acid that, in combination with a modulator nucleic acid, is capable of activating a Cas nuclease. In certain embodiments, the system further comprises the Cas protein that the targeter nucleic acid and the modulator nucleic acid are capable of binding or the Cas nuclease that the targeter nucleic acid and the modulator nucleic acid are capable of activating.

[0179] It is contemplated that the single or dual guide nucleic acids need to be the compatible with a Cas protein (e.g., Cas nuclease) to provide an operative CRISPR system. For example, the targeter stem sequence and the modulator stem sequence can be derived from a naturally occurring crRNA capable of activating a Cas nuclease in the absence of a tracrRNA.

[0180] Alternatively, the targeter stem sequence and the modulator stem sequence can be derived from a naturally occurring set of crRNA and tracrRNA, respectively, that are capable of activating a Cas nuclease. In certain embodiments, the nucleotide sequences of the targeter stem sequence and the modulator stem sequence are identical to the corresponding stem sequences of a stem-loop structure in such naturally occurring crRNA.

[0181] Guide nucleic acid sequences that are operative with a type II or type V Cas protein are known in the art and are disclosed, for example, in U.S. Pat. Nos. 9,790,490, 9,896,696, 10,113,179, and 10,266,850, and U.S. Patent Application Publication No. 2014/0242664. It is understood that these sequences are merely illustrative, and other guide nucleic acid sequences may also be used with these Cas proteins.

TABLE 4
Type V-A Cas Protein and Corresponding Single Guide Nucleic Acid Sequences

| Cas Protein | Scaffold Sequence¹ | PAM² |
|---|---|---|
| MAD7 (SEQ ID | UAAUUUCUACUCUUGUAGA (SEQ ID NO: 57), | 5′ TTTN |
| NO: 37) | AUCUACAACAGUAGA (SEQ ID NO: 58), | or 5′ |
| | AUCUACAAAAGUAGA (SEQ ID NO: 59), | CTTN |
| | GGAAUUUCUACUCUUGUAGA (SEQ ID NO: 60), | |
| | UAAUUCCCACUCUUGUGGG (SEQ ID NO: 61) | |
| MAD2 (SEQ ID | AUCUACAAGAGUAGA (SEQ ID NO: 62), | 5′ TTTN |
| NO: 38) | AUCUACAACAGUAGA (SEQ ID NO: 58), | |
| | AUCUACAAAAGUAGA (SEQ ID NO: 59), | |
| | AUCUACACUAGUAGA (SEQ ID NO: 63) | |
| AsCpf1 (SEQ | UAAUUUCUACUCUUGUAGA (SEQ ID NO: 57) | 5′ TTTN |
| ID NO: 3 of | | |
| WO | | |
| 2021/158918) | | |
| LbCpf1 (SEQ | UAAUUUCUACUAAGUGUAGA (SEQ ID NO: 64) | 5′ TTTN |
| ID NO: 4 of | | |
| WO | | |
| 2021/158918) | | |
| FnCpf1 (SEQ | UAAUUUUCUACUUGUUGUAGA (SEQ ID NO: 65) | 5′ TTN |
| ID NO: 5 of | | |
| WO | | |
| 2021/158918) | | |
| PbCpf1 (SEQ | AAUUUCUACUGUUGUAGA (SEQ ID NO: 66) | 5′ TTTC |
| ID NO: 6 of | | |
| WO | | |
| 2021/158918) | | |
| PsCpf1 (SEQ | AAUUUCUACUGUUGUAGA (SEQ ID NO: 66) | 5′ TTTC |
| ID NO: 7 of | | |
| WO | | |
| 2021/158918) | | |
| As2Cpf1 (SEQ | AAUUUCUACUGUUGUAGA (SEQ ID NO: 66) | 5′ TTTC |
| ID NO: 8 of | | |
| WO | | |
| 2021/158918) | | |
| McCpf1 (SEQ | GAAUUUCUACUGUUGUAGA (SEQ ID NO: 67) | 5′ TTTC |
| ID NO: 9 of | | |
| WO | | |
| 2021/158918) | | |
| Lb3Cpf1 (SEQ | GAAUUUCUACUGUUGUAGA (SEQ ID NO: 67) | 5′ TTTC |
| ID NO: 10 of | | |
| WO | | |
| 2021/158918) | | |
| EcCpf1 (SEQ | GAAUUUCUACUGUUGUAGA (SEQ ID NO: 67) | 5′ TTTC |
| ID NO: 11 of | | |
| WO | | |
| 2021/158918) | | |
| SmCsm1 (SEQ | GAAUUUCUACUGUUGUAGA (SEQ ID NO: 67) | 5′ TTTC |
| ID NO: 12 of | | |
| WO | | |
| 2021/158918) | | |
| SsCsm1 (SEQ | GAAUUUCUACUGUUGUAGA (SEQ ID NO: 67) | 5′ TTTC |
| ID NO: 13 of | | |
| WO | | |
| 2021/158918) | | |
| MbCsm1 (SEQ | GAAUUUCUACUGUUGUAGA (SEQ ID NO: 67) | 5′ TTTC |
| ID NO: 14 of | | |
| WO | | |
| 2021/158918) | | |
| ART2 (SEQ ID | GUCUAAAGGUACCACCAAAUUUCUACUGUUGUAGAU | 5′ TTTN |
| NO: 2 | (SEQ ID NO: 68) | or 5′ |
| | | NTTN |
| ART11 (SEQ ID | GCUUAGAACCUUUAAAUAAUUUCUACUAUUGUAGAU | 5′ TTTN |
| NO: 11 | (SEQ ID NO: 69) | or 5′ |
| | | NTTN |
| ART11* (SEQ | GCUUAGAACCUUUAAAUAAUUUCUACUAUUGUAGAU | 5′ TTTN |
| ID NO: 36 | (SEQ ID NO: 69) | or 5′ |
| | | NTTN |

¹The modulator sequence in the scaffold sequence is underlined; the targeter stem sequence in the scaffold sequence is bold-underlined. It is understood that a “scaffold sequence” listed herein constitutes a portion of a single guide nucleic acid. Additional nucleotide sequences, other than the spacer sequence, can be comprised in the single guide nucleic acid.
²In the consensus PAM sequences, N represents A, C, G, or T. Where the PAM sequence is preceded by “5′,” it means that the PAM is located immediately upstream of the target nucleotide sequence when using the non-target strand (i.e., the strand not hybridized with the spacer sequence) as the coordinate.

TABLE 5
Type V-A Cas Protein and Corresponding Dual Guide Nucleic Acid Sequences

| | | Targeter | |
|---|---|---|---|
| | | Stem | |
| Cas Protein | Modulator Sequence¹ | Sequence | PAM² |
| MAD7 (SEQ ID NO: | UAAUUUCUAC (SEQ ID NO: | GUAGA | 5′ TTTN |
| 37) | 70) | | or 5′ |
| | AUCUAC | GUAGA | CTTN |
| | GGAAUUUCUAC (SEQ ID NO: | GUAGA | |
| | 72) | | |
| | UAAUUCCCAC (SEQ ID NO: | GUGGG | |
| | 73) | | |
| MAD2 (SEQ ID NO: | AUCUAC | GUAGA | 5′ TTTN |
| 38) | | | |
| AsCpf1 (SEQ ID NO: | UAAUUUCUAC (SEQ ID NO: | GUAGA | 5′ TTTN |
| 3 of WO | 70) | | |
| 2021/158918) | | | |
| LbCpf1 (SEQ ID NO: | UAAUUUCUAC (SEQ ID NO: | GUAGA | 5′ TTTN |
| 4 of WO | 70) | | |
| 2021/158918) | | | |
| FnCpf1 (SEQ ID NO: | UAAUUUUCUACU (SEQ ID NO: | GUAGA | 5′ TTN |
| 5 of WO | 74) | | |
| 2021/158918) | | | |
| PbCpf1 (SEQ ID NO: | AAUUUCUAC | GUAGA | 5′ TTTC |
| 6 of WO | | | |
| 2021/158918) | | | |
| PsCpf1 (SEQ ID NO: | AAUUUCUAC | GUAGA | 5′ TTTC |
| 7 of WO | | | |
| 2021/158918) | | | |
| As2Cpf1 (SEQ ID | AAUUUCUAC | GUAGA | 5′ TTTC |
| NO: 8 of WO | | | |
| 2021/158918) | | | |
| McCpf1 (SEQ ID NO: | GAAUUUCUAC (SEQ ID NO: | GUAGA | 5′ TTTC |
| 9 of WO | 76) | | |
| 2021/158918) | | | |
| Lb3Cpf1 (SEQ ID | GAAUUUCUAC (SEQ ID NO: | GUAGA | 5′ TTTC |
| NO: 10 of WO | | | |
| 2021/158918) | 76) | | |
| EcCpf1 (SEQ ID NO: | GAAUUUCUAC (SEQ ID NO: | GUAGA | 5′ TTTC |
| 11 of WO | 76) | | |
| 2021/158918) | | | |
| SmCsm1 (SEQ ID NO: | GAAUUUCUAC (SEQ ID NO: | GUAGA | 5′ TTTC |
| 12 of WO | 76) | | |
| 2021/158918) | | | |
| SsCsm1 (SEQ ID NO: | GAAUUUCUAC (SEQ ID NO: | GUAGA | 5′ TTTC |
| 13 of WO | 76) | | |
| 2021/158918) | | | |
| MbCsm1 (SEQ ID NO: | GAAUUUCUAC (SEQ ID NO: | GUAGA | 5′ TTTC |
| 14 of WO | 76) | | |
| 2021/158918) | | | |
| ART2 (SEQ ID NO: 2) | AAAUUUCUAC (SEQ ID NO: | GUAGA | 5′ TTTN |
| | 77) | | or 5′ |
| | | | NTTN |
| ART11 (SEQ ID NO: | UAAUUUCUAC (SEQ ID NO: | GUAGA | 5′ TTTN |
| 11) | 70) | | or 5′ |
| | | | NTTN |
| ART11* (SEQ ID NO: | UAAUUUCUAC (SEQ ID NO: | GUAGA | 5′ TTTN |
| 36) | 70) | | or 5′ |
| | | | NTTN |

¹It is understood that a “modulator sequence” listed herein may constitute the nucleotide sequence of a modulator nucleic acid. Alternatively, additional nucleotide sequences can be comprised in the modulator nucleic acid 5′ and/or 3′ to a “modulator sequence” listed herein.
²In the consensus PAM sequences, N represents A, C, G, or T. Where the PAM sequence is preceded by “5′,” it means that the PAM is located immediately upstream of the target nucleotide sequence when using the non-target strand (i.e., the strand not hybridized with the spacer sequence) as the coordinate.

[0182] In certain embodiments, a guide nucleic acid, in the context of a type V-A CRISPR-Cas system, comprises a targeter stem sequence listed in Table 5. The same targeter stem sequences, as a portion of scaffold sequences, are bold-underlined in Table 4.

[0183] In certain embodiments, a guide nucleic acid is a single guide nucleic acid that comprises, from 5′ to 3′, a modulator stem sequence, a loop sequence, a targeter stem sequence, and a spacer sequence. In certain embodiments, the targeter stem sequence in the single guide nucleic acid is listed in Table 4 as a bold-underlined portion of scaffold sequence, and the modulator stem sequence is complementary (e.g., 100% complementary) to the targeter stem sequence. In certain embodiments, the single guide nucleic acid comprises, from 5′ to 3′, a modulator sequence listed in Table 4 as an underlined portion of a scaffold sequence, a loop sequence, a targeter stem sequence a bold-underlined portion of the same scaffold sequence, and a spacer sequence. In certain embodiments, an engineered, non-naturally occurring system comprises a single guide nucleic acid comprising a scaffold sequence listed in Table 4. In certain embodiments, the system further comprises a Cas protein (e.g., Cas nuclease) comprising an amino acid sequence at least 30%, 40%, 50%, 60%, 70%, 80%, 85%, 90%, 91%, 92%, 93%, 94%, 95%, 96%, 97%, 98%, 99%, or 100% identical to the amino acid sequence set forth in the SEQ ID NO listed in the same line of Table 4. In certain embodiments, the system further comprises a Cas protein (e.g., Cas nuclease) comprising the amino acid sequence set forth in the SEQ ID NO listed in the same line of Table 4. In certain embodiments, the system is useful for targeting, editing, or modifying a nucleic acid comprising a target nucleotide sequence close or adjacent to (e.g., immediately downstream of) a PAM listed in the same line of Table 4 when using the non-target strand (i.e., the strand not hybridized with the spacer sequence) as the coordinate.

[0184] In certain embodiments, a guide nucleic acid, e.g., dual gNA, comprises a targeter guide nucleic acid that comprises, from 5′ to 3′, a targeter stem sequence and a spacer sequence. In certain embodiments, the targeter stem sequence in the targeter nucleic acid is listed in Table 5. In certain embodiments, an engineered, non-naturally occurring system comprises the targeter nucleic acid and a modulator stem sequence complementary (e.g., 100% complementary) to the targeter stem sequence. In certain embodiments, the modulator nucleic acid comprises a modulator sequence listed in the same line of Table 5. In certain embodiments, the system further comprises a Cas protein (e.g., Cas nuclease) comprising an amino acid sequence at least 30%, 40%, 50%, 60%, 70%, 80%, 85%, 90%, 91%, 92%, 93%, 94%, 95%, 96%, 97%, 98%, 99%, or 100% identical to the amino acid sequence set forth in the SEQ ID NO listed in the same line of Table 5. In certain embodiments, the system further comprises a Cas protein (e.g., Cas nuclease) comprising the amino acid sequence set forth in the SEQ ID NO listed in the same line of Table 5. In certain embodiments, the system is useful for targeting, editing, or modifying a nucleic acid comprising a target nucleotide sequence close or adjacent to (e.g., immediately downstream of) a PAM listed in the same line of Table 5 when using the non-target strand (i.e., the strand not hybridized with the spacer sequence) as the coordinate.

[0185] A single guide nucleic acid, the targeter nucleic acid, and/or the modulator nucleic acid can be synthesized chemically or produced in a biological process (e.g., catalyzed by an RNA polymerase in an in vitro reaction). Such reaction or process may limit the lengths of the single guide nucleic acid, targeter nucleic acid, and/or modulator nucleic acid. In certain embodiments, a single guide nucleic acid is no more than 100, 90, 80, 70, 60, 50, 40, 30, or 25 nucleotides in length. In certain embodiments, a single guide nucleic acid is at least 20, 25, 30, 40, 50, 60, 70, 80, or 90 nucleotides in length. In certain embodiments, the single guide nucleic acid is 20-100, 20-90, 20-80, 20-70, 20-60, 20-50, 20-40, 20-30, 20-25, 25-100, 25-90, 25-80, 25-70, 25-60, 25-50, 25-40, 25-30, 30-100, 30-90, 30-80, 30-70, 30-60, 30-50, 30-40, 40-100, 40-90, 40-80, 40-70, 40-60, 40-50, 50-100, 50-90, 50-80, 50-70, 50-60, 60-100, 60-90, 60-80, 60-70, 70-100, 70-90, 70-80, 80-100, 80-90, or 90-100 nucleotides in length. In certain embodiments, a targeter nucleic acid is no more than 100, 90, 80, 70, 60, 50, 40, 30, or 25 nucleotides in length. In certain embodiments, a targeter nucleic acid is at least 20, 25, 30, 40, 50, 60, 70, 80, or 90 nucleotides in length. In certain embodiments, the targeter nucleic acid is 20-100, 20-90, 20-80, 20-70, 20-60, 20-50, 20-40, 20-30, 20-25, 25-100, 25-90, 25-80, 25-70, 25-60, 25-50, 25-40, 25-30, 30-100, 30-90, 30-80, 30-70, 30-60, 30-50, 30-40, 40-100, 40-90, 40-80, 40-70, 40-60, 40-50, 50-100, 50-90, 50-80, 50-70, 50-60, 60-100, 60-90, 60-80, 60-70, 70-100, 70-90, 70-80, 80-100, 80-90, or 90-100 nucleotides in length. In certain embodiments, a modulator nucleic acid is no more than 100, 90, 80, 70, 60, 50, 40, 30, or 20 nucleotides in length. In certain embodiments, a modulator nucleic acid is at least 10, 15, 20, 25, 30, 40, 50, 60, 70, 80, or 90 nucleotides in length. In certain embodiments, the modulator nucleic acid is 10-100, 10-90, 10-80, 10-70, 10-60, 10-50, 10-40, 10-30, 10-20, 15-100, 15-90, 15-80, 15-70, 15-60, 15-50, 15-40, 15-30, 15-20, 20-100, 20-90, 20-80, 20-70, 20-60, 20-50, 20-40, 20-30, 25-100, 25-90, 25-80, 25-70, 25-60, 25-50, 25-40, 25-30, 30-100, 30-90, 30-80, 30-70, 30-60, 30-50, 30-40, 40-100, 40-90, 40-80, 40-70, 40-60, 40-50, 50-100, 50-90, 50-80, 50-70, 50-60, 60-100, 60-90, 60-80, 60-70, 70-100, 70-90, 70-80, 80-100, 80-90, or 90-100 nucleotides in length.

[0186] It is contemplated that the length of the duplex formed within the single guide nuclei acid or formed between the targeter nucleic acid and the modulator nucleic acid, e.g., in a dual gNA, may be a factor in providing an operative CRISPR system. In certain embodiments, the targeter stem sequence and the modulator stem sequence each consist of 4-10 nucleotides that base pair with each other. In certain embodiments, the targeter stem sequence and the modulator stem sequence each consist of 4-9, 4-8, 4-7, 4-6, 4-5, 5-10, 5-9, 5-8, 5-7, or 5-6 nucleotides that base pair with each other. In certain embodiments, the targeter stem sequence and the modulator stem sequence each consist of 4, 5, 6, 7, 8, 9, or 10 nucleotides. It is understood that the composition of the nucleotides in each sequence affects the stability of the duplex, and a C-G base pair confers greater stability than an A-U base pair. In certain embodiments, 20%-80%, 20%-70%, 20%-60%, 20%-50%, 20%-40%, 20%-30%, 30%-80%, 30%-70%, 30%-60%, 30%-50%, 30%-40%, 40%-80%, 40%-70%, 40%-60%, 40%-50%, 50%-80%, 50%-70%, 50%-60%, 60%-80%, 60%-70%, or 70%-80% of the base pairs are C-G base pairs.

[0187] In certain embodiments, the targeter stem sequence and the modulator stem sequence each consist of 5 nucleotides. As such, the targeter stem sequence and the modulator stem sequence form a duplex of 5 base pairs. In certain embodiments, 0-4, 0-3, 0-2, 0-1, 1-5, 1-4, 1-3, 1-2, 2-5, 2-4, 2-3, 3-5, 3-4, or 4-5 out of the 5 base pairs are C-G base pairs. In certain embodiments, 0, 1, 2, 3, 4, or 5 out of the 5 base pairs are C-G base pairs. In certain embodiments, the targeter stem sequence consists of 5′-GUAGA-3′ and the modulator stem sequence consists of 5′-UCUAC-3′. In certain embodiments, the targeter stem sequence consists of 5′-GUGGG-3′ and the modulator stem sequence consists of 5′-CCCAC-3′.

[0188] In certain embodiments, in a type V-A system, the 3′ end of the targeter stem sequence is linked by no more than 1, 2, 3, 4, 5, 6, 7, 8, 9, or 10 nucleotides to the 5′ end of the spacer sequence. In certain embodiments, the targeter stem sequence and the spacer sequence are adjacent to each other, directly linked by an internucleotide bond. In certain embodiments, the targeter stem sequence and the spacer sequence are linked by one nucleotide, e.g., a uridine. In certain embodiments, the targeter stem sequence and the spacer sequence are linked by two or more nucleotides. In certain embodiments, the targeter stem sequence and the spacer sequence are linked by 1, 2, 3, 4, 5, 6, 7, 8, 9, or 10 nucleotides.

[0189] In certain embodiments, the targeter nucleic acid further comprises an additional nucleotide sequence 5′ to the targeter stem sequence. In certain embodiments, the additional nucleotide sequence comprises at least 1 (e.g., at least 2, at least 3, at least 4, at least 5, at least 6, at least 7, at least 8, at least 9, at least 10, at least 15, at least 20, at least 25, at least 30, at least 35, at least 40, at least 45, or at least 50) nucleotides. In certain embodiments, the additional nucleotide sequence consists of 1, 2, 3, 4, 5, 6, 7, 8, 9, 10, 15, 20, 25, 30, 35, 40, 45, or 50 nucleotides. In certain embodiments, the additional nucleotide sequence consists of 2 nucleotides. In certain embodiments, the additional nucleotide sequence is reminiscent to the loop or a fragment thereof (e.g., one, two, three, or four nucleotides at the 3′ end of the loop) in a crRNA of a corresponding single guide CRISPR-Cas system. It is understood that an additional nucleotide sequence 5′ to the targeter stem sequence can be dispensable. Accordingly, in certain embodiments, the targeter nucleic acid does not comprise any additional nucleotide 5′ to the targeter stem sequence.

[0190] In certain embodiments, the targeter nucleic acid or the single guide nucleic acid further comprises an additional nucleotide sequence containing one or more nucleotides at the 3′ end that does not hybridize with the target nucleotide sequence. The additional nucleotide sequence may protect the targeter nucleic acid from degradation by 3′-5′ exonuclease. In certain embodiments, the additional nucleotide sequence is no more than 100 nucleotides in length. In certain embodiments, the additional nucleotide sequence is no more than 90, 80, 70, 60, 50, 40, 30, 20, or 10 nucleotides in length. In certain embodiments, the additional nucleotide sequence is at least 1, 2, 3, 4, 5, 6, 7, 8, 9, 10, 15, 20, 25, 30, 35, 40, 45, or 50 nucleotides in length. In certain embodiments, the additional nucleotide sequence is 5-100, 5-50, 5-40, 5-30, 5-25, 5-20, 5-15, 5-10, 10-100, 10-50, 10-40, 10-30, 10-25, 10-20, 10-15, 15-100, 15-50, 15-40, 15-30, 15-25, 15-20, 20-100, 20-50, 20-40, 20-30, 20-25, 25-100, 25-50, 25-40, 25-30, 30-100, 30-50, 30-40, 40-100, 40-50, or 50-100 nucleotides in length.

[0191] In certain embodiments, the additional nucleotide sequence forms a hairpin with the spacer sequence. Such secondary structure may increase the specificity of guide nucleic acid or the engineered, non-naturally occurring system (see, Kocak et al. (2019) NAT. BIOTECH. 37:657-66). In certain embodiments, the free energy change during the hairpin formation is greater than or equal to −20 kcal/mol, −15 kcal/mol, −14 kcal/mol, −13 kcal/mol, −12 kcal/mol, −11 kcal/mol, or −10 kcal/mol. In certain embodiments, the free energy change during the hairpin formation is greater than or equal to −5 kcal/mol, −6 kcal/mol, −7 kcal/mol, −8 kcal/mol, −9 kcal/mol, −10 kcal/mol, −11 kcal/mol, −12 kcal/mol, −13 kcal/mol, −14 kcal/mol, or −15 kcal/mol. In certain embodiments, the free energy change during the hairpin formation is in the range of −20 to −10 kcal/mol, −20 to −11 kcal/mol, −20 to −12 kcal/mol, −20 to −13 kcal/mol, −20 to −14 kcal/mol, −20 to −15 kcal/mol, −15 to −10 kcal/mol, −15 to −11 kcal/mol, −15 to −12 kcal/mol, −15 to −13 kcal/mol, −15 to −14 kcal/mol, −14 to −10 kcal/mol, −14 to −11 kcal/mol, −14 to −12 kcal/mol, −14 to −13 kcal/mol, −13 to −10 kcal/mol, −13 to −11 kcal/mol, −13 to −12 kcal/mol, −12 to −10 kcal/mol, −12 to −11 kcal/mol, or −11 to −10 kcal/mol. In other embodiments, the targeter nucleic acid or the single guide nucleic acid does not comprise any nucleotide 3′ to the spacer sequence.

[0192] In certain embodiments, the modulator nucleic acid further comprises an additional nucleotide sequence 3′ to the modulator stem sequence. In certain embodiments, the additional nucleotide sequence comprises at least 1 (e.g., at least 2, at least 3, at least 4, at least 5, at least 6, at least 7, at least 8, at least 9, at least 10, at least 15, at least 20, at least 25, at least 30, at least 35, at least 40, at least 45, or at least 50) nucleotides. In certain embodiments, the additional nucleotide sequence consists of 1, 2, 3, 4, 5, 6, 7, 8, 9, 10, 15, 20, 25, 30, 35, 40, 45, or 50 nucleotides. In certain embodiments, the additional nucleotide sequence consists of 1 nucleotide (e.g., uridine). In certain embodiments, the additional nucleotide sequence consists of 2 nucleotides. In certain embodiments, the additional nucleotide sequence is reminiscent to the loop or a fragment thereof (e.g., one, two, three, or four nucleotides at the 5′ end of the loop) in a crRNA of a corresponding single guide CRISPR-Cas system. It is understood that an additional nucleotide sequence 3′ to the modulator stem sequence can be dispensable. Accordingly, in certain embodiments, the modulator nucleic acid does not comprise any additional nucleotide 3′ to the modulator stem sequence.

[0193] It is understood that the additional nucleotide sequence 5′ to the targeter stem sequence and the additional nucleotide sequence 3′ to the modulator stem sequence, if present, may interact with each other. For example, although the nucleotide immediately 5′ to the targeter stem sequence and the nucleotide immediately 3′ to the modulator stem sequence do not form a Watson-Crick base pair (otherwise they would constitute part of the targeter stem sequence and part of the modulator stem sequence, respectively), other nucleotides in the additional nucleotide sequence 5′ to the targeter stem sequence and the additional nucleotide sequence 3′ to the modulator stem sequence may form one, two, three, or more base pairs (e.g., Watson-Crick base pairs). Such interaction may affect the stability of a complex comprising the targeter nucleic acid and the modulator nucleic acid.

[0194] The stability of a complex comprising a targeter nucleic acid and a modulator nucleic acid can be assessed by the Gibbs free energy change (AG) during the formation of the complex, either calculated or actually measured. Where all the predicted base pairing in the complex occurs between a base in the targeter nucleic acid and a base in the modulator nucleic acid, i.e., there is no intra-strand secondary structure, the AG during the formation of the complex correlates generally with the AG during the formation of a secondary structure within the corresponding single guide nucleic acid. Methods of calculating or measuring the AG are known in the art. An exemplary method is RNAfold (rna.tbi.univie.ac.at/cgi-bin/RNA WebSuite/RNAfold.cgi) as disclosed in Gruber et al. (2008) NUCLEIC ACIDS RES., 36 (Web Server issue): W70-W74. Unless indicated otherwise, the AG values in the present disclosure are calculated by RNAfold for the formation of a secondary structure within a corresponding single guide nucleic acid. In certain embodiments, the AG is lower than or equal to −1 kcal/mol, e.g., lower than or equal to −2 kcal/mol, lower than or equal to −3 kcal/mol, lower than or equal to −4 kcal/mol, lower than or equal to −5 kcal/mol, lower than or equal to −6 kcal/mol, lower than or equal to −7 kcal/mol, lower than or equal to −7.5 kcal/mol, or lower than or equal to −8 kcal/mol. In certain embodiments, the AG is greater than or equal to −10 kcal/mol, e.g., greater than or equal to −9 kcal/mol, greater than or equal to −8.5 kcal/mol, or greater than or equal to −8 kcal/mol. In certain embodiments, the AG is in the range of −10 to −4 kcal/mol. In certain embodiments, the AG is in the range of −8 to −4 kcal/mol, −7 to −4 kcal/mol, −6 to −4 kcal/mol, −5 to −4 kcal/mol, −8 to −4.5 kcal/mol, −7 to −4.5 kcal/mol, −6 to −4.5 kcal/mol, or −5 to −4.5 kcal/mol. In certain embodiments, the AG is about-8 kcal/mol, −7 kcal/mol, −6 kcal/mol, −5 kcal/mol, −4.9 kcal/mol, −4.8 kcal/mol, −4.7 kcal/mol, −4.6 kcal/mol, −4.5 kcal/mol, −4.4 kcal/mol, −4.3 kcal/mol, −4.2 kcal/mol, −4.1 kcal/mol, or −4 kcal/mol.

[0195] It is understood that the AG may be affected by a sequence in the targeter nucleic acid that is not within the targeter stem sequence, and/or a sequence in the modulator nucleic acid that is not within the modulator stem sequence. For example, one or more base pairs (e.g., Watson-Crick base pair) between an additional sequence 5′ to the targeter stem sequence and an additional sequence 3′ to the modulator stem sequence may reduce the AG, i.e., stabilize the nucleic acid complex. In certain embodiments, the nucleotide immediately 5′ to the targeter stem sequence comprises a uracil or is a uridine, and the nucleotide immediately 3′ to the modulator stem sequence comprises a uracil or is a uridine, thereby forming a nonconventional U-U base pair.

[0196] In certain embodiments, the modulator nucleic acid or the single guide nucleic acid comprises a nucleotide sequence referred to herein as a “5′ tail” positioned 5′ to the modulator stem sequence. In a naturally occurring type V-A CRISPR-Cas system, the 5′ tail is a nucleotide sequence positioned 5′ to the stem-loop structure of the crRNA. A 5′ tail in an engineered type V-A CRISPR-Cas system, whether single guide or dual guide, can be reminiscent to the 5′ tail in a corresponding naturally occurring type V-A CRISPR-Cas system.

[0197] Without being bound by theory, it is contemplated that the 5′ tail may participate in the formation of the CRISPR-Cas complex. For example, in certain embodiments, the 5′ tail forms a pseudoknot structure with the modulator stem sequence, which is recognized by the Cas protein (see, Yamano et al. (2016) CELL, 165:949). In certain embodiments, the 5′ tail is at least 3 (e.g., at least 4 or at least 5) nucleotides in length. In certain embodiments, the 5′ tail is 3, 4, or 5 nucleotides in length. In certain embodiments, the nucleotide at the 3′ end of the 5′ tail comprises a uracil or is a uridine. In certain embodiments, the second nucleotide in the 5′ tail, the position counted from the 3′ end, comprises a uracil or is a uridine. In certain embodiments, the third nucleotide in the 5′ tail, the position counted from the 3′ end, comprises an adenine or is an adenosine. This third nucleotide may form a base pair (e.g., a Watson-Crick base pair) with a nucleotide 5′ to the modulator stem sequence. Accordingly, in certain embodiments, the modulator nucleic acid comprises a uridine or a uracil-containing nucleotide 5′ to the modulator stem sequence. In certain embodiments, the 5′ tail comprises the nucleotide sequence of 5′-AUU-3′. In certain embodiments, the 5′ tail comprises the nucleotide sequence of 5′-AAUU-3′. In certain embodiments, the 5′ tail comprises the nucleotide sequence of 5′-UAAUU-3′. In certain embodiments, the 5′ tail is positioned immediately 5′ to the modulator stem sequence.

[0198] In certain embodiments, the single guide nucleic acid, the targeter nucleic acid, and/or the modulator nucleic acid are designed to reduce the degree of secondary structure other than the hybridization between the targeter stem sequence and the modulator stem sequence. In certain embodiments, no more than about 75%, 50%, 40%, 30%, 25%, 20%, 15%, 10%, 5%, 1%, or fewer of the nucleotides of the single guide nucleic acid other than the targeter stem sequence and the modulator stem sequence participate in self-complementary base pairing when optimally folded. In certain embodiments, no more than about 75%, 50%, 40%, 30%, 25%, 20%, 15%, 10%, 5%, 1%, or fewer of the nucleotides of the targeter nucleic acid and/or the modulator nucleic acid participate in self-complementary base pairing when optimally folded. Optimal folding may be determined by any suitable polynucleotide folding algorithm. Some programs are based on calculating the minimal Gibbs free energy. An example of one such algorithm is mFold, as described by Zuker and Stiegler (NUCLEIC ACIDS RES. 9 (1981), 133-148). Another example folding algorithm is the online webserver RNAfold, developed at Institute for Theoretical Chemistry at the University of Vienna, using the centroid structure prediction algorithm (see e.g., A. R. Gruber et al., 2008, Cell 106 (1): 23-24; and PA Carr and GM Church, 2009, Nature Biotechnology 27 (12): 1151-62).

[0199] The targeter nucleic acid is directed to a specific target nucleotide sequence, and a donor template can be designed to modify the target nucleotide sequence or a sequence nearby. It is understood, therefore, that association of the single guide nucleic acid, the targeter nucleic acid, or the modulator nucleic acid with a donor template can increase editing efficiency and reduce off-targeting. Accordingly, in certain embodiments, the single guide nucleic acid or the modulator nucleic acid further comprises a donor template-recruiting sequence capable of hybridizing with a donor template (see FIG. 2B). Donor templates are described in the “Donor Templates” subsection of section II infra. The donor template and donor template-recruiting sequence can be designed such that they bear sequence complementarity. In certain embodiments, the donor template-recruiting sequence is at least 90% (e.g., at least 91%, at least 92%, at least 93%, at least 94%, at least 95%, at least 96%, at least 97%, at least 98%, or at least 99%) complementary to at least a portion of the donor template. In certain embodiments, the donor template-recruiting sequence is 100% complementary to at least a portion of the donor template. In certain embodiments, where the donor template comprises an engineered sequence not homologous to the sequence to be repaired, the donor template-recruiting sequence is capable of hybridizing with the engineered sequence in the donor template. In certain embodiments, the donor template-recruiting sequence is at least 20, 25, 30, 35, 40, 45, 50, 55, 60, 65, 70, 75, 80, 85, 90, 95, or 100 nucleotides in length. In certain embodiments, the donor template-recruiting sequence is positioned at or near the 5′ end of the single guide nucleic acid or at or near the 5′ end of the modulator nucleic acid. In certain embodiments, the donor template-recruiting sequence is linked to the 5′ tail, if present, or to the modulator stem sequence, of the single guide nucleic acid or the modulator nucleic acid through an internucleotide bond or a nucleotide linker.

[0200] In certain embodiments, the single guide nucleic acid or the modulator nucleic acid further comprises an editing enhancer sequence, which increases the efficiency of gene editing and/or homology-directed repair (HDR) (see FIG. 2C). Exemplary editing enhancer sequences are described in Park et al. (2018) NAT. COMMUN. 9:3313. In certain embodiments, the editing enhancer sequence is positioned 5′ to the 5′ tail, if present, or 5′ to the single guide nucleic acid or the modulator stem sequence. In certain embodiments, the editing enhancer sequence is 1-50, 4-50, 9-50, 15-50, 25-50, 1-25, 4-25, 9-25, 15-25, 1-15, 4-15, 9-15, 1-9, 4-9, or 1-4 nucleotides in length. In certain embodiments, the editing enhancer sequence is about 1, 2, 3, 4, 5, 6, 7, 8, 9, 10, 15, 20, 25, 30, 35, 40, 45, 50, or 55 nucleotides in length. The editing enhancer sequence is designed to minimize homology to the target nucleotide sequence or any other sequence that the engineered, non-naturally occurring system may be contacted to, e.g., the genome sequence of a cell into which the engineered, non-naturally occurring system is delivered. In certain embodiments, the editing enhancer is designed to minimize the presence of hairpin structure. The editing enhancer can comprise one or more of the chemical modifications disclosed herein.

[0201] The single guide nucleic acid, the modulator nucleic acid, and/or the targeter nucleic acid can further comprise a protective nucleotide sequence that prevents or reduces nucleic acid degradation. In certain embodiments, the protective nucleotide sequence is at least 5 (e.g., at least 10, at least 15, at least 20, at least 25, at least 30, at least 35, at least 40, at least 45, or at least 50) nucleotides in length. The length of the protective nucleotide sequence increases the time for an exonuclease to reach the 5′ tail, modulator stem sequence, targeter stem sequence, and/or spacer sequence, thereby protecting these portions of the single guide nucleic acid, the modulator nucleic acid, and/or the targeter nucleic acid from degradation by an exonuclease. In certain embodiments, the protective nucleotide sequence forms a secondary structure, such as a hairpin or a tRNA structure, to reduce the speed of degradation by an exonuclease (see, for example, Wu et al. (2018) CELL. MOL. LIFE SCI., 75 (19): 3593-3607). Secondary structures can be predicted by methods known in the art, such as the online webserver RNAfold developed at University of Vienna using the centroid structure prediction algorithm (see, Gruber et al. (2008) NUCLEIC ACIDS RES., 36: W70). Certain chemical modifications, which may be present in the protective nucleotide sequence, can also prevent or reduce nucleic acid degradation, as disclosed in the “RNA Modifications” subsection infra.

[0202] A protective nucleotide sequence is typically located at the 5′ or 3′ end of the single guide nucleic acid, the modulator nucleic acid, and/or the targeter nucleic acid. In certain embodiments, the single guide nucleic acid comprises a protective nucleotide sequence at the 5′ end, at the 3′ end, or at both ends, optionally through a nucleotide linker. In certain embodiments, the modulator nucleic acid comprises a protective nucleotide sequence at the 5′ end, at the 3′ end, or at both ends, optionally through a nucleotide linker. In particular embodiments, the modulator nucleic acid comprises a protective nucleotide sequence at the 5′ end (see FIG. 2A). In certain embodiments, the targeter nucleic acid comprises a protective nucleotide sequence at the 5′ end, at the 3′ end, or at both ends, optionally through a nucleotide linker.

[0203] As described above, various nucleotide sequences can be present in the 5′ portion of a single nucleic acid or a modulator nucleic acid, including but not limited to a donor template-recruiting sequence, an editing enhancer sequence, a protective nucleotide sequence, and a linker connecting such sequence to the 5′ tail, if present, or to the modulator stem sequence. It is understood that the functions of donor template recruitment, editing enhancement, protection against degradation, and linkage are not exclusive to each other, and one nucleotide sequence can have one or more of such functions. For example, in certain embodiments, the single guide nucleic acid or the modulator nucleic acid comprises a nucleotide sequence that is both a donor template-recruiting sequence and an editing enhancer sequence. In certain embodiments, the single guide nucleic acid or the modulator nucleic acid comprises a nucleotide sequence that is both a donor template-recruiting sequence and a protective sequence. In certain embodiments, the single guide nucleic acid or the modulator nucleic acid comprises a nucleotide sequence that is both an editing enhancer sequence and a protective sequence. In certain embodiments, the single guide nucleic acid or the modulator nucleic acid comprises a nucleotide sequence that is a donor template-recruiting sequence, an editing enhancer sequence, and a protective sequence. In certain embodiments, the nucleotide sequence 5′ to the 5′ tail, if present, or 5′ to the modulator stem sequence is 1-90, 1-80, 1-70, 1-60, 1-50, 1-40, 1-30, 1-20, 1-10, 10-90, 10-80, 10-70, 10-60, 10-50, 10-40, 10-30, 10-20, 20-90, 20-80, 20-70, 20-60, 20-50, 20-40, 20-30, 30-90, 30-80, 30-70, 30-60, 30-50, 30-40, 40-90, 40-80, 40-70, 40-60, 40-50, 50-90, 50-80, 50-70, 50-60, 60-90, 60-80, 60-70, 70-90, 70-80, or 80-90 nucleotides in length.

[0204] In certain embodiments, an engineered, non-naturally occurring system further comprises one or more compounds (e.g., small molecule compounds) that enhance HDR and/or inhibit NHEJ. Exemplary compounds having such functions are described in Maruyama et al. (2015) NAT BIOTECHNOL. 33 (5): 538-42; Chu et al. (2015) NAT BIOTECHNOL. 33 (5): 543-48; Yu et al. (2015) CELL STEM CELL 16 (2): 142-47; Pinder et al. (2015) NUCLEIC ACIDS RES. 43 (19): 9379-92; and Yagiz et al. (2019) COMMUN. BIOL. 2:198. In certain embodiments, an engineered, non-naturally occurring system further comprises one or more compounds selected from the group consisting of DNA ligase IV antagonists (e.g., SCR7 compound, Ad4 E1B55K protein, and Ad4 E4orf6 protein), RAD51 agonists (e.g., RS-1), DNA-dependent protein kinase (DNA-PK) antagonists (e.g., NU7441 and KU0060648), β3-adrenergic receptor agonists (e.g., L755507), inhibitors of intracellular protein transport from the ER to the Golgi apparatus (e.g., brefeldin A), and any combinations thereof.

[0205] In certain embodiments, an engineered, non-naturally occurring system comprising a targeter nucleic acid and a modulator nucleic acid is tunable or inducible. For example, in certain embodiments, the targeter nucleic acid, the modulator nucleic acid, and/or the Cas protein can be introduced to the target nucleotide sequence at different times, the system becoming active only when all components are present. In certain embodiments, the amounts of the targeter nucleic acid, the modulator nucleic acid, and/or the Cas protein can be titrated to achieve desired efficiency and specificity. In certain embodiments, excess amount of a nucleic acid comprising the targeter stem sequence or the modulator stem sequence can be added to the system, thereby dissociating the complex of the targeter nucleic and modulator nucleic acid and turning off the system.

### C. gNA Modifications

[0206] Guide nucleic acids, including a single guide nucleic acid, a targeter nucleic acid, and/or a modulator nucleic acid, may comprise a DNA (e.g., modified DNA), an RNA (e.g., modified RNA), or a combination thereof. In certain embodiments, the single guide nucleic acid comprises a DNA (e.g., modified DNA), an RNA (e.g., modified RNA), or a combination thereof. In certain embodiments, the targeter nucleic acid comprises a DNA (e.g., modified DNA), an RNA (e.g., modified RNA), or a combination thereof. In certain embodiments, the modulator nucleic acid comprises a DNA (e.g., modified DNA), an RNA (e.g., modified RNA), or a combination thereof. Spacer sequences can be presented as DNA sequences by including thymidines (T) rather than uridines (U). It is understood that corresponding RNA sequences and DNA/RNA chimeric sequences are also contemplated. For example, where the spacer sequence is an RNA, its sequence can be derived from a DNA sequence disclosed herein by replacing each T with U. As a result, for the purpose of describing a nucleotide sequence, T and U are used interchangeably herein.

[0207] In certain embodiments engineered, non-naturally occurring systems comprising a targeter nucleic acid comprising: a spacer sequence designed to hybridize with a target nucleotide sequence and a targeter stem sequence; and a modulator nucleic acid comprising a modulator stem sequence complementary to the targeter stem sequence, and, optionally, a 5′ sequence, e.g., a tail sequence, wherein, in a single guide nucleic acid the targeter nucleic acid and the modulator nucleic acid are part of a single polynucleotide, and in a dual guide nucleic acid, the targeter nucleic acid and the modulator nucleic acid are separate nucleic acids; modifications can include one or more chemical modifications to one or more nucleotides or internucleotide linkages at or near the 3′ end of the targeter nucleic acid (dual and single gNA), at or near the 5′ end of the targeter nucleic acid (dual gNA), at or near the 3′ end of the modulator nucleic acid (dual gNA), at or near the 5′ end of the modulator nucleic acid (single and dual gNA), or combinations thereof as appropriate for single or dual gNA. In certain embodiments, the Cas nuclease is a type V-A Cas nuclease. Modulator and/or targeter nucleic sequences can include further sequences, as detailed in the Guide Nucleic Acids section, and modifications can be in these further sequences, as appropriate and apparent to one of skill in the art. In embodiments described in this section, below, in certain embodiments, guide nucleic acid is oriented from 5′ at the modulator nucleic acid to 3′ at the modulator stem sequence, and 5′ at the targeter stem sequence to 3′ at the targeter sequence (see, e.g., FIGS. 1A and 1B); in certain embodiments, as appropriate, guide nucleic acid is oriented from 3′ at the modulator nucleic acid to 5′ at the modulator stem sequence, and 3′ at the targeter stem sequence to 5′ at the targeter sequence.

[0208] The targeter nucleic acid may comprise a DNA (e.g., modified DNA), an RNA (e.g., modified RNA), or a combination thereof. The modulator nucleic acid may comprise a DNA (e.g., modified DNA), an RNA (e.g., modified RNA), or a combination thereof. In certain embodiments, the targeter nucleic acid is an RNA and the modulator nucleic acid is an RNA. A targeter nucleic acid in the form of an RNA is also called targeter RNA, and a modulator nucleic acid in the form of an RNA is also called modulator RNA. The nucleotide sequences disclosed herein are presented as DNA sequences by including thymidines (T) and/or RNA sequences including uridines (U). It is understood that corresponding DNA sequences, RNA sequences, and DNA/RNA chimeric sequences are also contemplated. For example, where a spacer sequence is presented as a DNA sequence, a nucleic acid comprising this spacer sequence as an RNA can be derived from the DNA sequence disclosed herein by replacing each T with U. As a result, for the purpose of describing a nucleotide sequence, T and U are used interchangeably herein.

[0209] In certain embodiments some or all of the gNA is RNA, e.g., a gRNA. In certain embodiments, 5-100%, 10-100%, 20-100%, 30-100%, 40-100%, 50-100%, 60-100%, 70-100%, 80-100%, 90-100%, 95-100%, 99-100%, 99.5-100% of the gNA is gRNA. In certain embodiments, 20%-80%, 20%-70%, 20%-60%, 20%-50%, 20%-40%, 20%-30%, 30%-80%, 30%-70%, 30%-60%, 30%-50%, 30%-40%, 40%-80%, 40%-70%, 40%-60%, 40%-50%, 50%-80%, 50%-70%, 50%-60%, 60%-80%, 60%-70%, or 70%-80% of gNA is RNA. In certain embodiments, 50% of the gNA is RNA. In certain embodiments, 70% of the gNA is RNA. In certain embodiments, 90% of the gNA is RNA. In certain embodiments, 100% of the gNA is RNA, e.g., a gRNA. In further embodiments, the remaining portion of the gNA that is not RNA comprises a modified ribonucleotide, a deoxyribonucleotide, a modified deoxyribonucleotide, or a synthetic, e.g., unnatural nucleotide, for example, not intended to be limiting, threose nucleic acid, locked nucleic acid, peptide nucleic acid, arabinonucleic acid, hexose nucleic acid, among others.

[0210] In certain embodiments, the targeter nucleic acid and/or the modulator nucleic acid are RNAs with one or more modifications in a ribose group, one or more modifications in a phosphate group, one or more modifications in a nucleobase, one or more terminal modifications, or a combination thereof. Exemplary modifications are disclosed in U.S. Pat. Nos. 10,900,034 and 10,767,175, U.S. Patent Application Publication No. 2018/0119140, Watts et al. (2008) DRUG DISCOV. TODAY 13:842-55, and Hendel et al. (2015) NAT. BIOTECHNOL. 33:985.

[0211] In certain embodiments, a targeter nucleic acid, e.g., RNA, comprises at least one nucleotide at or near the 3′ end comprising a modification to a ribose, phosphate group, nucleobase, or terminal modification. In certain embodiments, the 3′ end of the targeter nucleic acid comprises the spacer sequence. In certain embodiments, the 3′ end of the targeter nucleic acid comprises the targeter stem sequence. Exemplary modifications are disclosed in Dang et al. (2015) GENOME BIOL. 16:280, Kocaz et al. (2019) NATURE BIOTECH. 37:657-66, Liu et al. (2019) NUCLEIC ACIDS RES. 47 (8): 4169-4180, Schubert et al. (2018) J. CYTOKINE BIOL. 3 (1): 121, Teng et al. (2019) GENOME BIOL. 20 (1): 15, Watts et al. (2008) DRUG DISCOV. TODAY 13 (19-20): 842-55, and Wu et al. (2018) CELL MOL. LIFE. SCI. 75 (19): 3593-607.

[0212] Modifications in a ribose group include but are not limited to modifications at the 2′ position or modifications at the 4′ position. For example, in certain embodiments, the ribose comprises 2′-O—C1-4alkyl, such as 2′-O-methyl (2′-OMe, or M). In certain embodiments, the ribose comprises 2′-O—C1-3alkyl-O—C1-3alkyl, such as 2′-methoxyethoxy (2′-O—CH₂CH₂OCH₃) also known as 2′-O-(2-methoxyethyl) or 2′-MOE. In certain embodiments, the ribose comprises 2′-O-allyl. In certain embodiments, the ribose comprises 2′-O-2,4-Dinitrophenol (DNP). In certain embodiments, the ribose comprises 2′-halo, such as 2′-F, 2′-Br, 2′-Cl, or 2′-I. In certain embodiments, the ribose comprises 2′—NH₂. In certain embodiments, the ribose comprises 2′-H (e.g., a deoxynucleotide). In certain embodiments, the ribose comprises 2′-arabino or 2′-F-arabino. In certain embodiments, the ribose comprises 2′-LNA or 2′-ULNA. In certain embodiments, the ribose comprises a 4′-thioribosyl.

[0213] Modifications can also include a deoxy group, for example a 2′-deoxy-3′-phosphonoacetate (DP), a 2′-deoxy-3′-thiophosphonoacetate (DSP).

[0214] Internucleotide linkage modifications in a phosphate group include but are not limited to a phosphorothioate(S), a chiral phosphorothioate, a phosphorodithioate, a boranophosphonate, a C₁₋₄alkyl phosphonate such as a methylphosphonate, a boranophosphonate, a phosphonocarboxylate such as a phosphonoacetate (P), a phosphonocarboxylate ester such as a phosphonoacetate ester, an amide, a thiophosphonocarboxylate such as a thiophosphonoacetate (SP), a thiophosphonocarboxylate ester such as a thiophosphonoacetate ester, and a 2′,5′-linkage having a phosphodiester or any of the modified phosphates above. Various salts, mixed salts and free acid forms are also included.

[0215] Modifications in a nucleobase include but are not limited to 2-thiouracil, 2-thiocytosine, 4-thiouracil, 6-thioguanine, 2-aminoadenine, 2-aminopurine, pseudouracil, hypoxanthine, 7-deazaguanine, 7-deaza-8-azaguanine, 7-deazaadenine, 7-deaza-8-azaadenine, 5-methylcytosine, 5-methyluracil, 5-hydroxymethylcytosine, 5-hydroxymethyluracil, 5,6-dehydrouracil, 5-propynylcytosine, 5-propynyluracil, 5-ethynylcytosine, 5-cthynyluracil, 5-allyluracil, 5-allylcytosine, 5-aminoallyluracil, 5-aminoallyl-cytosine, 5-bromouracil, 5-iodouracil, diaminopurine, difluorotoluene, dihydrouracil, an abasic nucleotide, Z base, P base, Unstructured Nucleic Acid, isoguanine, isocytosine (see, Piccirilli et al. (1990) NATURE, 343:33), 5-methyl-2-pyrimidine (see, Rappaport (1993) BIOCHEMISTRY, 32:3047), x (A,G,C,T), and y (A,G,C,T).

[0216] Terminal modifications include but are not limited to polyethyleneglycol (PEG), hydrocarbon linkers (such as heteroatom (O,S,N)-substituted hydrocarbon spacers; halo-substituted hydrocarbon spacers; keto-, carboxyl-, amido-, thionyl-, carbamoyl-, thionocarbamaoyl-containing hydrocarbon spacers, propanediol), spermine linkers, dyes such as fluorescent dyes (for example, fluoresceins, rhodamines, cyanines), quenchers (for example, dabcyl, BHQ), and other labels (for example biotin, digoxigenin, acridine, streptavidin, avidin, peptides and/or proteins). In certain embodiments, a terminal modification comprises a conjugation (or ligation) of the RNA to another molecule comprising an oligonucleotide (such as deoxyribonucleotides and/or ribonucleotides), a peptide, a protein, a sugar, an oligosaccharide, a steroid, a lipid, a folic acid, a vitamin and/or other molecule. In certain embodiments, a terminal modification incorporated into the RNA is located internally in the RNA sequence via a linker such as 2-(4-butylamidofluorescein) propane-1,3-diol bis (phosphodiester) linker, which is incorporated as a phosphodiester linkage and can be incorporated anywhere between two nucleotides in the RNA.

[0217] The modifications disclosed above can be combined in the targeter nucleic acid and/or the modulator nucleic acid that are in the form of RNA. In certain embodiments, the modification in the RNA is selected from the group consisting of incorporation of 2′-O-methyl-3′phosphorothioate (MS), 2′-O-methyl-3′-phosphonoacetate (MP), 2′-O-methyl-3′-thiophosphonoacetate (MSP), 2′-halo-3′-phosphorothioate (e.g., 2′-fluoro-3′-phosphorothioate), 2′-halo-3′-phosphonoacetate (e.g., 2′-fluoro-3′-phosphonoacetate), and 2′-halo-3′-thiophosphonoacetate (e.g., 2′-fluoro-3′-thiophosphonoacetate).

[0218] In certain embodiments, modifications can include 2′-O-methyl (M), a phosphorothioate(S), a phosphonoacetate (P), a thiophosphonoacetate (SP), a 2′-O-methyl-3′-phosphorothioate (MS), a 2′-O-methyl-3′-phosphonoacetate (MP), a 2′-O-methyl-3′-thiophosphonoacetate (MSP), a 2′-deoxy-3′-phosphonoacetate (DP), a 2′-deoxy-3′-thiophosphonoacetate (DSP), or a combination thereof, at or near either the 3′ or 5′ end of either the targeter or modulator nucleic acid, as appropriate for single or dual gNA. In certain embodiments, modifications can include either a 5′ or a 3′ propanediol or C3 linker modification.

[0219] In certain embodiments, the modification alters the stability of the RNA. In certain embodiments, the modification enhances the stability of the RNA, e.g., by increasing nuclease resistance of the RNA relative to a corresponding RNA without the modification. Stability-enhancing modifications include but are not limited to incorporation of 2′-O-methyl, a 2′-O—C₁₋₄alkyl, 2′-halo (e.g., 2′-F, 2′-Br, 2′-Cl, or 2′-I), 2′MOE, a 2′-O—C1-3alkyl-O—C1-3alkyl, 2′—NH₂, 2′-H (or 2′-deoxy), 2′-arabino, 2′-F-arabino, 4′-thioribosyl sugar moiety, 3′-phosphorothioate, 3′-phosphonoacetate, 3′-thiophosphonoacetate, 3′-methylphosphonate, 3′-boranophosphate, 3′-phosphorodithioate, locked nucleic acid (“LNA”) nucleotide which comprises a methylene bridge between the 2′ and 4′ carbons of the ribose ring, and unlocked nucleic acid (“ULNA”) nucleotide. Such modifications are suitable for use as a protecting group to prevent or reduce degradation of the 5′ sequence, e.g., a tail sequence, modulator stem sequence (dual guide nucleic acids), targeter stem sequence (dual guide nucleic acids), and/or spacer sequence (see, the “Targeter and Modulator nucleic acids” subsection).

[0220] In certain embodiments, the modification alters the specificity of the engineered, non-naturally occurring system. In certain embodiments, the modification enhances the specificity of the engineered, non-naturally occurring system, e.g., by enhancing on-target binding and/or cleavage, or reducing off-target binding and/or cleavage, or a combination thereof. Specificity-enhancing modifications include but are not limited to 2-thiouracil, 2-thiocytosine, 4-thiouracil, 6-thioguanine, 2-aminoadenine, and pseudouracil. Within 10, 5, 4, 3, 2, or 1 nucleotide of the 3′ end, for example the 3′ end nucleotide, is modified.

[0221] In certain embodiments, the modification alters the immunostimulatory effect of the RNA relative to a corresponding RNA without the modification. For example, in certain embodiments, the modification reduces the ability of the RNA to activate TLR7, TLR8, TLR9, TLR3, RIG-I, and/or MDA5.

[0222] In certain embodiments, the targeter nucleic acid and/or the modulator nucleic acid comprise at least 1, 2, 3, 4, 5, 6, 7, 8, 9, 10, 11, 12, 13, 14, 15, 16, 17, 18, 19, 20, 21, 22, 23, 24, 25, 26, 27, 28, 29, 30, 31, 32, 33, 34, 35, 36, 37, 38, 39, or 40 modified nucleotides or internucleotide linkages. The modification can be made at one or more positions in the targeter nucleic acid and/or the modulator nucleic acid such that these nucleic acids retain functionality. For example, the modified nucleic acids can still direct the Cas protein to the target nucleotide sequence and allow the Cas protein to exert its effector function. It is understood that the particular modification(s) at a position may be selected based on the functionality of the nucleotide or internucleotide linkage at the position. For example, a specificity-enhancing modification may be suitable for a nucleotide or internucleotide linkage in the spacer sequence, the targeter stem sequence, or the modulator stem sequence. A stability-enhancing modification may be suitable for one or more terminal nucleotides or internucleotide linkages in the targeter nucleic acid and/or the modulator nucleic acid. In certain embodiments, at least 1 (e.g., at least 2, at least 3, at least 4, or at least 5) terminal nucleotides or internucleotide linkages at or near the 5′ end and/or at least 1 (e.g., at least 2, at least 3, at least 4, or at least 5) terminal nucleotides or internucleotide linkages at or near the 3′ end of the targeter nucleic acid are modified. In certain embodiments, 5 or fewer (e.g., 1 or fewer, 2 or fewer, 3 or fewer, or 4 or fewer) terminal nucleotides or internucleotide linkages at or near the 5′ end and/or 5 or fewer (e.g., 1 or fewer, 2 or fewer, 3 or fewer, or 4 or fewer) terminal nucleotides or internucleotide linkages at or near the 3′ end of the targeter nucleic acid are modified. In certain embodiments, at least 1 (e.g., at least 2, at least 3, at least 4, or at least 5) terminal nucleotides or internucleotide linkages at or near the 5′ end and/or at least 1 (e.g., at least 2, at least 3, at least 4, or at least 5) terminal nucleotides or internucleotide linkages at or near the 3′ end of the modulator nucleic acid are modified. In certain embodiments, 5 or fewer (e.g., 1 or fewer, 2 or fewer, 3 or fewer, or 4 or fewer) terminal nucleotides or internucleotide linkages at or near the 5′ end and/or 5 or fewer (e.g., 1 or fewer, 2 or fewer, 3 or fewer, or 4 or fewer) terminal nucleotides or internucleotide linkages at or near the 3′ end of the modulator nucleic acid are modified. Selection of positions for modifications is described in U.S. Pat. Nos. 10,900,034 and 10,767,175. As used in this paragraph, where the targeter or modulator nucleic acid is a combination of DNA and RNA, the nucleic acid as a whole is considered as an RNA, and the DNA nucleotide(s) are considered as modification(s) of the RNA, including a 2′-H modification of the ribose and optionally a modification of the nucleobase.

[0223] It is understood that, in dual guide nucleic acid systems the targeter nucleic acid and the modulator nucleic acid, while not in the same nucleic acids, i.e., not linked end-to-end through a traditional internucleotide bond, can be covalently conjugated to each other through one or more chemical modifications introduced into these nucleic acids, thereby increasing the stability of the double-stranded complex and/or improving other characteristics of the system.

### III. COMPOSITION AND METHODS FOR TARGETING, EDITING, AND/OR MODIFYING GENOMIC DNA

[0224] An engineered, non-naturally occurring system, such as disclosed herein, can be useful for targeting, editing, and/or modifying a target nucleic acid, such as a DNA (e.g., genomic DNA) in a cell or organism.

[0225] The present invention provides a method of cleaving a target nucleic acid (e.g., DNA) comprising the sequence of a preselected target sequence or a portion thereof, the method comprising contacting the target DNA with an engineered, non-naturally occurring system disclosed herein, thereby resulting in cleavage of the target DNA.

[0226] In addition, the present invention provides a method of binding a target nucleic acid (e.g., DNA) comprising the sequence of a preselected target sequence or a portion thereof, the method comprising contacting the target DNA with an engineered, non-naturally occurring system disclosed herein, thereby resulting in binding of the system to the target DNA. This method can be useful, e.g., for detecting the presence and/or location of a preselected target gene, for example, if a component of the system (e.g., the Cas protein) comprises a detectable marker.

[0227] In addition, provided are methods of modifying a target nucleic acid (e.g., DNA) comprising the sequence of a preselected target sequence or a portion thereof, or a structure (e.g., protein) associated with the target DNA (e.g., a histone protein in a chromosome), the method comprising contacting the target DNA with an engineered, non-naturally occurring system disclosed herein, wherein the Cas protein comprises an effector domain or is associated with an effector protein, thereby resulting in modification of the target DNA or the structure associated with the target DNA. The modification corresponds to the function of the effector domain or effector protein. Exemplary functions described in the “Cas Proteins” subsection in Section I supra are applicable hereto.

[0228] An engineered, non-naturally occurring system can be contacted with the target nucleic acid as a complex. Accordingly, in certain embodiments, a method comprises contacting the target nucleic acid with a CRISPR-Cas complex comprising a targeter nucleic acid, a modulator nucleic acid, and a Cas protein disclosed herein. In certain embodiments, the Cas protein is a type V-A, type V-C, or type V-D Cas protein (e.g., Cas nuclease). In certain embodiments, the Cas protein is a type V-A Cas protein (e.g., Cas nuclease).

[0229] In certain embodiments, provided is a method of editing a human genomic sequence at one of a group of preselected target gene loci, the method comprising delivering an engineered, non-naturally occurring system disclosed herein into a human cell, thereby resulting in editing of the genomic sequence at the target gene locus in the human cell. In certain embodiments, provided herein is a method of detecting a human genomic sequence at one of a group of preselected target gene loci, the method comprising delivering the engineered, non-naturally occurring system disclosed herein into a human cell, wherein a component of the system (e.g., the Cas protein) comprises a detectable marker, thereby detecting the target gene locus in the human cell. In certain embodiments, provided herein is a method of modifying a human chromosome at one of a group of preselected target gene loci, the method comprising delivering the engineered, non-naturally occurring system disclosed herein into a human cell, wherein the Cas protein comprises an effector domain or is associated with an effector protein, thereby resulting in modification of the chromosome at the target gene locus in the human cell.

[0230] The CRISPR-Cas complex may be delivered to a cell by introducing a pre-formed ribonucleoprotein (RNP) complex into the cell. Alternatively, one or more components of the CRISPR-Cas complex may be expressed in the cell. Exemplary methods of delivery are known in the art and described in, for example, U.S. Pat. Nos. 8,697,359, 10,113,167, 10,570,418, 10,829,787, 11,118,194, and 11,125,739 and U.S. Patent Application Publication Nos.

[0231] 2015/0344912, 2018/0119140, and 2018/0282763.

[0232] It is understood that contacting a DNA (e.g., genomic DNA) in a cell with a CRISPR-Cas complex does not require delivery of all components of the complex into the cell. For example, one or more of the components may be pre-existing in the cell. In certain embodiments, the cell (or a parental/ancestral cell thereof) has been engineered to express the Cas protein, and the single guide nucleic acid (or a nucleic acid comprising a regulatory element operably linked to a nucleotide sequence encoding the single guide nucleic acid), the targeter nucleic acid (or a nucleic acid comprising a regulatory element operably linked to a nucleotide sequence encoding the targeter nucleic acid), and/or the modulator nucleic acid (or a nucleic acid comprising a regulatory element operably linked to a nucleotide sequence encoding the modulator nucleic acid) are delivered into the cell. In certain embodiments, the cell (or a parental/ancestral cell thereof) has been engineered to express the modulator nucleic acid, and the Cas protein (or a nucleic acid comprising a regulatory element operably linked to a nucleotide sequence encoding the Cas protein) and the targeter nucleic acid (or a nucleic acid comprising a regulatory element operably linked to a nucleotide sequence encoding the targeter nucleic acid) are delivered into the cell. In certain embodiments, the cell (or a parental/ancestral cell thereof) has been engineered to express the Cas protein and the modulator nucleic acid, and the targeter nucleic acid (or a nucleic acid comprising a regulatory element operably linked to a nucleotide sequence encoding the targeter nucleic acid) is delivered into the cell.

[0233] In certain embodiments, the target DNA is in the genome of a target cell. Accordingly, the present invention also provides a cell comprising the non-naturally occurring system or a CRISPR expression system described herein. In addition, the present invention provides a cell whose genome has been modified by the CRISPR-Cas system or complex disclosed herein.

[0234] The target cells can be mitotic or post-mitotic cells from any organism, such as a bacterial cell (e.g., E coli), an archacal cell, a cell of a single-cell eukaryotic organism, a plant cell, an algal cell, e.g., Botryococcus braunii, Chlamydomonas reinhardtii, Nannochloropsis gaditana, Chlorella pyrenoidosa, Sargassum patens C. Agardh, or the like, a fungal cell (e.g., a yeast cell, such as S. cervisiae), an animal cell, a cell from an invertebrate animal (e.g. fruit fly, enidarian, echinoderm, nematode, etc.), a cell from a vertebrate animal (e.g., fish, amphibian, reptile, bird, mammal), a cell from a mammal, a cell from a rodent, or a cell from a human. The types of target cells include but are not limited to a stem cell (e.g., an embryonic stem (ES) cell, an induced pluripotent stem (iPS) cell, a germ cell), a somatic cell (e.g., a fibroblast, a hematopoietic cell, a T lymphocyte (e.g., CD8+T lymphocyte), an NK cell, a neuron, a muscle cell, a bone cell, a hepatocyte, a pancreatic cell), an in vitro or in vivo embryonic cell of an embryo at any stage (e.g., a 1-cell, 2-cell, 4-cell, 8-cell; stage zebrafish embryo). Cells may be from established cell lines or may be primary cells (i.e., cells and cells cultures that have been derived from a subject and allowed to grow in vitro for a limited number of passages of the culture). For example, primary cultures are cultures that may have been passaged within 0 times, 1 time, 2 times, 4 times, 5 times, 10 times, or 15 times, but not enough times to go through the crisis stage. Typically, the primary cell lines are maintained for fewer than 10 passages in vitro. If the cells are primary cells, they may be harvest from an individual by any suitable method. For example, leukocytes may be harvested by apheresis, leukocytapheresis, or density gradient separation, while cells from tissues such as skin, muscle, bone marrow, spleen, liver, pancreas, lung, intestine, or stomach can be harvested by biopsy. The harvested cells may be used immediately, or may be stored under frozen conditions with a cryopreservative and thawed at a later time in a manner as commonly known in the art.

### A. Ribonucleoprotein (RNP) Delivery and “Cas RNA” Delivery

[0235] An engineered, non-naturally occurring system disclosed herein can be delivered into a cell by suitable methods known in the art, including but not limited to ribonucleoprotein (RNP) delivery and “Cas RNA” delivery described below.

[0236] In certain embodiments, a CRISPR-Cas system including a single guide nucleic acid and a Cas protein, or a CRISPR-Cas system including a targeter nucleic acid, a modulator nucleic acid, and a Cas protein, can be combined into a RNP complex and then delivered into the cell as a pre-formed complex. This method is suitable for active modification of the genetic or epigenetic information in a cell during a limited time period. For example, where the Cas protein has nuclease activity to modify the genomic DNA of the cell, the nuclease activity only needs to be retained for a period of time to allow DNA cleavage, and prolonged nuclease activity may increase off-targeting. Similarly, certain epigenetic modifications can be maintained in a cell once established and can be inherited by daughter cells.

[0237] A “ribonucleoprotein” or “RNP,” as used herein, can refer to a complex comprising a nucleoprotein and a ribonucleic acid. A “nucleoprotein” as provided herein can refer to a protein capable of binding a nucleic acid (e.g., RNA, DNA). Where the nucleoprotein binds a ribonucleic acid it can be referred to as “ribonucleoprotein.” The interaction between the ribonucleoprotein and the ribonucleic acid may be direct, e.g., by covalent bond, or indirect, e.g., by non-covalent bond (e.g., electrostatic interactions (e.g., ionic bond, hydrogen bond, halogen bond), van der Waals interactions (e.g., dipole-dipole, dipole-induced dipole, London dispersion), ring stacking (pi effects), hydrophobic interactions, or the like). In certain embodiments, the ribonucleoprotein includes an RNA-binding motif non-covalently bound to the ribonucleic acid. For example, positively charged aromatic amino acid residues (e.g., lysine residues) in the RNA-binding motif may form electrostatic interactions with the negative nucleic acid phosphate backbones of the RNA.

[0238] To ensure efficient loading of the Cas protein, the single guide nucleic acid, or the combination of the targeter nucleic acid and the modulator nucleic acid, can be provided in excess molar amount (e.g., at least 2 fold, at least 3 fold, at least 4 fold, or at least 5 fold) relative to the Cas protein. In certain embodiments, the targeter nucleic acid and the modulator nucleic acid are annealed under suitable conditions prior to complexing with the Cas protein. In other embodiments, the targeter nucleic acid, the modulator nucleic acid, and the Cas protein are directly mixed together to form an RNP.

[0239] A variety of delivery methods can be used to introduce an RNP disclosed herein into a cell. Exemplary delivery methods or vehicles include but are not limited to microinjection, liposomes (see, e.g., U.S. Pat. No. 10,829,787,) such as molecular trojan horses liposomes that delivers molecules across the blood brain barrier (see, Pardridge et al. (2010) COLD SPRING HARB. PROTOC., doi: 10.1101/pdb.prot5407), immunoliposomes, virosomes, microvesicles (e.g., exosomes and ARMMs), polycations, lipid: nucleic acid conjugates, electroporation, cell permeable peptides (see, U.S. Pat. No. 11,118,194), nanoparticles, nanowires (see, Shalek et al. (2012) NANO LETTERS, 12:6498), exosomes, and perturbation of cell membrane (e.g., by passing cells through a constriction in a microfluidic system, see, U.S. Pat. No. 11,125,739). Where the target cell is a proliferating cell, the efficiency of RNP delivery can be enhanced by cell cycle synchronization (see, U.S. Pat. No. 10,570,418). In certain embodiments, an RNP is delivered into a cell by electroporation.

[0240] In certain embodiments, a CRISPR-Cas system is delivered into a cell in a “approach, i.e., delivering (a) a single guide nucleic acid, or a combination of a targeter nucleic acid and a modulator nucleic acid, and (b) an RNA (e.g., messenger RNA (mRNA)) encoding a Cas protein. The RNA encoding the Cas protein can be translated in the cell and form a complex with the single guide nucleic acid or combination of the targeter nucleic acid and the modulator nucleic acid intracellularly. Similar to the RNP approach, RNAs have limited half-lives in cells, even though stability-increasing modification(s) can be made in one or more of the RNAs.

[0241] Accordingly, the “Cas RNA” approach is suitable for active modification of the genetic or epigenetic information in a cell during a limited time period, such as DNA cleavage, and has the advantage of reducing off-targeting.

[0242] The mRNA can be produced by transcription of a DNA comprising a regulatory element operably linked to a Cas coding sequence. Given that multiple copies of Cas protein can be generated from one mRNA, the single guide nucleic acid, or the targeter nucleic acid and the modulator nucleic acid are generally provided in excess molar amount (e.g., at least 5 fold, at least 10 fold, at least 20 fold, at least 30 fold, at least 50 fold, or at least 100 fold) relative to the mRNA. In certain embodiments, the targeter nucleic acid and the modulator nucleic acid are annealed under suitable conditions prior to delivery into the cells. In other embodiments, the targeter nucleic acid and the modulator nucleic acid are delivered into the cells without annealing in vitro.

[0243] A variety of delivery systems can be used to introduce an “Cas RNA” system into a cell. Non-limiting examples of delivery methods or vehicles include microinjection, biolistic particles, liposomes (see, e.g., U.S. Pat. No. 10,829,787) such as molecular trojan horses liposomes that delivers molecules across the blood brain barrier (see, Pardridge et al. (2010) COLD SPRING HARB. PROTOC., doi: 10.1101/pdb.prot5407), immunoliposomes, virosomes, polycations, lipid: nucleic acid conjugates, electroporation, nanoparticles, nanowires (see, Shalek et al. (2012) NANO LETTERS, 12:6498), exosomes, and perturbation of cell membrane (e.g., by passing cells through a constriction in a microfluidic system, see, U.S. Pat. No. 11,125,739). Specific examples of the “nucleic acid only” approach by electroporation are described in International (PCT) Publication No. WO 2016/164356.

[0244] In certain embodiments, the CRISPR-Cas system is delivered into a cell in the form of (a) a single guide nucleic acid or a combination of a targeter nucleic acid and a modulator nucleic acid, and (b) a DNA comprising a regulatory element operably linked to a Cas coding sequence. The DNA can be provided in a plasmid, viral vector, or any other form described in the “CRISPR Expression Systems” subsection. Such delivery method may result in constitutive expression of Cas protein in the target cell (e.g., if the DNA is maintained in the cell in an episomal vector or is integrated into the genome), and may increase the risk of off-targeting which is undesirable when the Cas protein has nuclease activity. Notwithstanding, this approach is useful when the Cas protein comprises a non-nuclease effector (e.g., a transcriptional activator or repressor). It is also useful for research purposes and for genome editing of plants.

### B. CRISPR Expression Systems

[0245] Also provided herein is a nucleic acid comprising a regulatory element operably linked to a nucleotide sequence encoding a guide nucleic acid disclosed herein. In certain embodiments, the nucleic acid comprises a regulatory element operably linked to a nucleotide sequence encoding a single guide nucleic acid; this nucleic acid alone can constitute a CRISPR expression system. In certain embodiments, the nucleic acid comprises a regulatory element operably linked to a nucleotide sequence encoding a targeter nucleic acid. In certain embodiments, the nucleic acid further comprises a nucleotide sequence encoding a modulator nucleic acid, wherein the nucleotide sequence encoding the modulator nucleic acid is operably linked to the same regulatory element as the nucleotide sequence encoding the targeter nucleic acid or a different regulatory element; this nucleic acid alone can constitute a CRISPR expression system.

[0246] In addition, the present invention provides a CRISPR expression system comprising: (a) a nucleic acid comprising a first regulatory element operably linked to a nucleotide sequence encoding a targeter nucleic acid and (b) a nucleic acid comprising a second regulatory element operably linked to a nucleotide sequence encoding a modulator nucleic acid.

[0247] In certain embodiments, a CRISPR expression system further comprises a nucleic acid comprising a third regulatory element operably linked to a nucleotide sequence encoding a Cas protein, such as a Cas protein disclosed herein. In certain embodiments, the Cas protein is a type V-A, type V-C, or type V-D Cas protein (e.g., Cas nuclease). In certain embodiments, the Cas protein is a type V-A Cas protein (e.g., Cas nuclease).

[0248] As used in this context, the term “operably linked” can mean that the nucleotide sequence of interest is linked to the regulatory element in a manner that allows for expression of the nucleotide sequence (e.g., in an in vitro transcription/translation system or in a host cell when the vector is introduced into the host cell).

[0249] The nucleic acids of a CRISPR expression system described above may be independently selected from various nucleic acids such as DNA (e.g., modified DNA) and RNA (e.g., modified RNA). In certain embodiments, the nucleic acids comprising a regulatory element operably linked to one or more nucleotide sequences encoding the guide nucleic acids are in the form of DNA. In certain embodiments, the nucleic acid comprising a third regulatory element operably linked to a nucleotide sequence encoding the Cas protein is in the form of DNA. The third regulatory element can be a constitutive or inducible promoter that drives the expression of the Cas protein. In other embodiments, the nucleic acid comprising a third regulatory element operably linked to a nucleotide sequence encoding the Cas protein is in the form of RNA (e.g., mRNA).

[0250] Nucleic acids of a CRISPR expression system can be provided in one or more vectors. The term “vector,” as used herein, can refer to a nucleic acid molecule capable of transporting another nucleic acid to which it has been linked. Conventional viral and non-viral based gene transfer methods can be used to introduce nucleic acids in cells, such as prokaryotic cells, eukaryotic cells, mammalian cells, or target tissues. Non-viral vector delivery systems include DNA plasmids, RNA (e.g., a transcript of a vector described herein), naked nucleic acid, and nucleic acid complexed with a delivery vehicle, such as a liposome. Viral vector delivery systems include DNA and RNA viruses, which have either episomal or integrated genomes after delivery to the cell. Gene therapy procedures are known in the art and disclosed in Van Brunt (1988) BIOTECHNOLOGY, 6:1149; Anderson (1992) SCIENCE, 256:808; Nabel & Feigner (1993) TIBTECH, 11:211; Mitani & Caskey (1993) TIBTECH, 11:162; Dillon (1993) TIBTECH, 11:167; Miller (1992) NATURE, 357:455; Vigne, (1995) RESTORATIVE NEUROLOGY AND NEUROSCIENCE, 8:35; Kremer & Perricaudet (1995) BRITISH MEDICAL BULLETIN, 51:31; Haddada et al. (1995) CURRENT TOPICS IN MICROBIOLOGY AND IMMUNOLOGY, 199:297; Yu et al. (1994) GENE THERAPY, 1:13; and Doerfler and Bohm (Eds.) (2012) The Molecular Repertoire of Adenoviruses II: Molecular Biology of Virus-Cell Interactions. In certain embodiments, at least one of the vectors is a DNA plasmid. In certain embodiments, at least one of the vectors is a viral vector (e.g., retrovirus, adenovirus, or adeno-associated virus).

[0251] Certain vectors are capable of autonomous replication in a host cell into which they are introduced (e.g., bacterial vectors having a bacterial origin of replication and episomal mammalian vectors). Other vectors (e.g., non-episomal mammalian vectors and replication defective viral vectors) do not autonomously replicate in the host cell. Certain vectors, however, may be integrated into the genome of the host cell and thereby are replicated along with the host genome. A skilled person in the art will appreciate that different vectors may be suitable for different delivery methods and have different host tropism, and will be able to select one or more vectors suitable for the use.

[0252] The term “regulatory element,” as used herein, can refer to a transcriptional and/or translational control sequence, such as a promoter, enhancer, transcription termination signal (e.g., polyadenylation signal), internal ribosomal entry sites (IRES), protein degradation signal, or the like, that provide for and/or regulate transcription of a non-coding sequence (e.g., a targeter nucleic acid or a modulator nucleic acid) or a coding sequence (e.g., a Cas protein) and/or regulate translation of an encoded polypeptide. Such regulatory elements are described, for example, in Goeddel, GENE EXPRESSION TECHNOLOGY: METHODS IN ENZYMOLOGY, 185, Academic Press, San Diego, Calif. (1990). Regulatory elements include those that direct constitutive expression of a nucleotide sequence in many types of host cell and those that direct expression of the nucleotide sequence only in certain host cells (e.g., tissue-specific regulatory sequences). A tissue-specific promoter may direct expression primarily in a desired tissue of interest, such as muscle, neuron, bone, skin, blood, specific organs (e.g., liver, pancreas), or particular cell types (e.g., lymphocytes). Regulatory elements may also direct expression in a temporal-dependent manner, such as in a cell-cycle dependent or developmental stage-dependent manner, which may or may not also be tissue or cell-type specific. In certain embodiments, a vector comprises one or more pol III promoter (e.g., 1, 2, 3, 4, 5, or more pol III promoters), one or more pol II promoters (e.g., 1, 2, 3, 4, 5, or more pol II promoters), one or more pol I promoters (e.g., 1, 2, 3, 4, 5, or more pol I promoters), or combinations thereof. Examples of pol III promoters include, but are not limited to, U6 and Hl promoters. Examples of pol II promoters include, but are not limited to, the retroviral Rous sarcoma virus (RSV) LTR promoter (optionally with the RSV enhancer), the cytomegalovirus (CMV) promoter (optionally with the CMV enhancer), the SV40 promoter, the dihydrofolate reductase promoter, the β-actin promoter, the phosphoglycerol kinase (PGK) promoter, and the EF1α promoter. Also encompassed by the term “regulatory element” are enhancer elements, such as WPRE; CMV enhancers; the R-U5′ segment in LTR of HTLV-I (see, Takebe et al. (1988) MOL. CELL. BIOL., 8:466); SV40 enhancer; and the intron sequence between exons 2 and 3 of rabbit β-globin (see, O'Hare et al. (1981) PROC. NATL. ACAD. SCI. USA., 78:1527). It will be appreciated by those skilled in the art that the design of the expression vector can depend on factors such as the choice of the host cell to be transformed, the level of expression desired, etc. A vector can be introduced into host cells to produce transcripts, proteins, or peptides, including fusion proteins or peptides, encoded by nucleic acids as described herein (e.g., CRISPR transcripts, proteins, enzymes, mutant forms thereof, or fusion proteins thereof).

[0253] In certain embodiments, the nucleotide sequence encoding the Cas protein is codon optimized for expression in a prokaryotic cell, e.g., E coli, eukaryotic host cell, e.g., a yeast cell (e.g., S. cerevisiae), a mammalian cell (e.g., a mouse cell, a rat cell, or a human cell), or a plant cell. Various species exhibit particular bias for certain codons of a particular amino acid. Codon bias (differences in codon usage between organisms) often correlates with the efficiency of translation of messenger RNA (mRNA), which is in turn believed to be dependent on, among other things, the properties of the codons being translated and the availability of particular transfer RNA (tRNA) molecules. The predominance of selected tRNAs in a cell is generally a reflection of the codons used most frequently in peptide synthesis. Accordingly, genes can be tailored for optimal gene expression in a given organism based on codon optimization. Codon usage tables are readily available, for example, at the “Codon Usage Database” available at kazusa.or.jp/codon/and these tables can be adapted in a number of ways (see, Nakamura et al. (2000) NUCL. ACIDS RES., 28:292). Computer algorithms for codon optimizing a particular sequence for expression in a particular host cell, such as Gene Forge (Aptagen; Jacobus, Pa.), arc also available. In certain embodiments, the codon optimization facilitates or improves expression of the Cas protein in the host cell.

### C. Donor Templates

[0254] Cleavage of a target nucleotide sequence in the genome of a cell by a CRISPR-Cas system or complex can activate DNA damage pathways, which may rejoin the cleaved DNA fragments by NHEJ or HDR. HDR requires a repair template, either endogenous or exogenous, to transfer the sequence information from the repair template to the target.

[0255] In certain embodiments, an engineered, non-naturally occurring system or CRISPR expression system further comprises a donor template. As used herein, the term “donor template” can refer to a nucleic acid designed to serve as a repair template at or near the target nucleotide sequence upon introduction into a cell or organism. In certain embodiments, the donor template is complementary to a polynucleotide comprising the target nucleotide sequence or a portion thereof. When optimally aligned, a donor template may overlap with one or more nucleotides of a target nucleotide sequences (e.g., about or more than about 1, 5, 10, 15, 20, 25, 30, 35, 40, or more nucleotides). The nucleotide sequence of the donor template is typically not identical to the genomic sequence that it replaces. Rather, the donor template may contain one or more substitutions, insertions, deletions, inversions, or rearrangements with respect to the genomic sequence, so long as sufficient homology is present to support homology-directed repair. In certain embodiments, the donor template comprises a non-homologous sequence flanked by two regions of homology (i.e., homology arms), such that homology-directed repair between the target DNA region and the two flanking sequences results in insertion of the non-homologous sequence at the target region. In certain embodiments, the donor template comprises a non-homologous sequence 10-100 nucleotides, 50-500 nucleotides, 100-1,000 nucleotides, 200-2,000 nucleotides, or 500-5,000 nucleotides in length positioned between two homology arms.

[0256] Generally, the homologous region(s) of a donor template has at least 50% sequence identity to a genomic sequence with which recombination is desired. The homology arms are designed or selected such that they are capable of recombining with the nucleotide sequences flanking the target nucleotide sequence under intracellular conditions. In certain embodiments, where HDR of the non-target strand is desired, the donor template comprises a first homology arm homologous to a sequence 5′ to the target nucleotide sequence and a second homology arm homologous to a sequence 3′ to the target nucleotide sequence. In certain embodiments, the first homology arm is at least 50% (e.g., at least 60%, at least 70%, at least 75%, at least 80%, at least 85%, at least 90%, at least 91%, at least 92%, at least 93%, at least 94%, at least 95%, at least 96%, at least 97%, at least 98%, at least 99%, or 100%) identical to a sequence 5′ to the target nucleotide sequence. In certain embodiments, the second homology arm is at least 50% (e.g., at least 60%, at least 70%, at least 75%, at least 80%, at least 85%, at least 90%, at least 91%, at least 92%, at least 93%, at least 94%, at least 95%, at least 96%, at least 97%, at least 98%, at least 99%, or 100%) identical to a sequence 3′ to the target nucleotide sequence. In certain embodiments, when the donor template sequence and a polynucleotide comprising a target nucleotide sequence are optimally aligned, the nearest nucleotide of the donor template is within about 1, 5, 10, 15, 20, 25, 50, 75, 100, 200, 300, 400, 500, 1000, 2000, 3000, 4000, or more nucleotides from the target nucleotide sequence.

[0257] In certain embodiments, the donor template further comprises an engineered sequence not homologous to the sequence to be repaired. Such engineered sequence can harbor a barcode and/or a sequence capable of hybridizing with a donor template-recruiting sequence disclosed herein.

[0258] In certain embodiments, the donor template further comprises one or more mutations relative to the genomic sequence, wherein the one or more mutations reduce or prevent cleavage, by the same CRISPR-Cas system, of the donor template or of a modified genomic sequence with at least a portion of the donor template sequence incorporated. In certain embodiments, in the donor template, the PAM adjacent to the target nucleotide sequence and recognized by the Cas nuclease is mutated to a sequence not recognized by the same Cas nuclease. In certain embodiments, in the donor template, the target nucleotide sequence (e.g., the seed region) is mutated. In certain embodiments, the one or more mutations are silent with respect to the reading frame of a protein-coding sequence encompassing the mutated sites.

[0259] The donor template can be provided to the cell as single-stranded DNA, single-stranded RNA, double-stranded DNA, or double-stranded RNA. It is understood that a CRISPR-Cas system, such as a system disclosed herein, may possess nuclease activity to cleave the target strand, the non-target strand, or both. When HDR of the target strand is desired, a donor template having a nucleic acid sequence complementary to the target strand is also contemplated.

[0260] The donor template can be introduced into a cell in linear or circular form. If introduced in linear form, the ends of the donor template may be protected (e.g., from exonucleolytic degradation) by methods known to those of skill in the art. For example, one or more dideoxynucleotide residues are added to the 3′ terminus of a linear molecule and/or self-complementary oligonucleotides are ligated to one or both ends (see, for example, Chang et al. (1987) PROC. NATL. ACAD SCI USA, 84:4959; Nehls et al. (1996) SCIENCE, 272:886; see also the chemical modifications for increasing stability and/or specificity of RNA disclosed supra). Additional methods for protecting exogenous polynucleotides from degradation include, but are not limited to, addition of terminal amino group(s) and the use of modified internucleotide linkages such as, for example, phosphorothioates, phosphoramidates, and O-methyl ribose or deoxyribose residues. As an alternative to protecting the termini of a linear donor template, additional lengths of sequence may be included outside of the regions of homology that can be degraded without impacting recombination.

[0261] A donor template can be a component of a vector as described herein, contained in a separate vector, or provided as a separate polynucleotide, such as an oligonucleotide, linear polynucleotide, or synthetic polynucleotide. In certain embodiments, the donor template is a DNA. In certain embodiments, a donor template is in the same nucleic acid as a sequence encoding the single guide nucleic acid, a sequence encoding the targeter nucleic acid, a sequence encoding the modulator nucleic acid, and/or a sequence encoding the Cas protein, where applicable. In certain embodiments, a donor template is provided in a separate nucleic acid. A donor template polynucleotide may be of any suitable length, such as about or at least about 50, 75, 100, 150, 200, 500, 1000, 2000, 3000, 4000, or more nucleotides in length.

[0262] A donor template can be introduced into a cell as an isolated nucleic acid. Alternatively, a donor template can be introduced into a cell as part of a vector (e.g., a plasmid) having additional sequences such as, for example, replication origins, promoters and genes encoding antibiotic resistance, that are not intended for insertion into the DNA region of interest. Alternatively, a donor template can be delivered by viruses (e.g., adenovirus, adeno-associated virus (AAV)). In certain embodiments, the donor template is introduced as an AAV, e.g., a pseudotyped AAV. The capsid proteins of the AAV can be selected by a person skilled in the art based upon the tropism of the AAV and the target cell type. For example, in certain embodiments, the donor template is introduced into a hepatocyte as AAV8 or AAV9. In certain embodiments, the donor template is introduced into a hematopoietic stem cell, a hematopoietic progenitor cell, or a T lymphocyte (e.g., CD8+T lymphocyte) as AAV6 or an AAVHSC (see, U.S. Pat. No. 9,890,396). It is understood that the sequence of a capsid protein (VP1, VP2, or VP3) may be modified from a wild-type AAV capsid protein, for example, having at least 50% (e.g., at least 60%, at least 70%, at least 75%, at least 80%, at least 85%, at least 90%, at least 91%, at least 92%, at least 93%, at least 94%, at least 95%, at least 96%, at least 97%, at least 98%, or at least 99%) sequence identity to a wild-type AAV capsid sequence.

[0263] The donor template can be delivered to a cell (e.g., a primary cell) by various delivery methods, such as a viral or non-viral method disclosed herein. In certain embodiments, a non-viral donor template is introduced into the target cell as a naked nucleic acid or in complex with a liposome or poloxamer. In certain embodiments, a non-viral donor template is introduced into the target cell by electroporation. In other embodiments, a viral donor template is introduced into the target cell by infection. The engineered, non-naturally occurring system can be delivered before, after, or simultaneously with the donor template (see, International (PCT) Application Publication No. WO 2017/053729). A skilled person in the art will be able to choose proper timing based upon the form of delivery (consider, for example, the time needed for transcription and translation of RNA and protein components) and the half-life of the molecule(s) in the cell. In particular embodiments, where the CRISPR-Cas system including the Cas protein is delivered by electroporation (e.g., as an RNP), the donor template (e.g., as an AAV) is introduced into the cell within 4 hours (e.g., within 1, 2, 3, 4, 5, 6, 7, 8, 9, 10, 11, 12, 13, 14, 15, 16, 17, 18, 19, 20, 25, 30, 35, 40, 45, 50, 55, 60, 90, 120, 150, 180, 210, or 240 minutes) after the introduction of the engineered, non-naturally occurring system.

[0264] In certain embodiments, the donor template is conjugated covalently to a modulator nucleic acid. Covalent linkages suitable for this conjugation are known in the art and are described, for example, in U.S. Pat. No. 9,982,278 and Savic et al. (2018) ELIFE 7: e33761. In certain embodiments, the donor template is covalently linked to a modulator nucleic acid (e.g., the 5′ end of the modulator nucleic acid) through an internucleotide bond. In certain embodiments, the donor template is covalently linked to a modulator nucleic acid (e.g., the 5′ end of the modulator nucleic acid) through a linker.

[0265] In certain embodiments, the donor template can comprise any nucleic acid chemistry. In certain embodiments, the donor template can comprise DNA and/or RNA nucleotides. In certain embodiments, the donor template can comprise single-stranded DNA, linear single-stranded RNA, linear double-stranded DNA, linear double-stranded RNA, circular single-stranded DNA, circular single-stranded RNA, circular double-stranded DNA, or circular double-stranded RNA. In certain embodiments, the donor template comprises a mutation in a PAM sequence to partially or completely abolish binding of the RNP to the DNA. In certain embodiments, the donor template is present at a concentration of at least 0.05, 0.01, 0.2, 0.3, 0.4, 0.5, 0.6, 0.7, 0.8, 0.9, 1, 1.25, 1.5, 1.75, 2, 3, or 4, and/or no more than 0.01, 0.2, 0.3, 0.4, 0.5, 0.6, 0.7, 0.8, 0.9, 1, 1.25, 1.5, 1.75, 2, 3, 4, or 5 μg μL-1, for example 0.01-5 μg μL-1. In certain embodiments, the donor template comprises one or more promoters. In certain embodiments, the donor template comprises a promoter that shares at least 70%, at least 75%, at least 80%, at least 85%, at least 90%, at least 95%, at least 99.5% sequence identity with any one of SEQ ID NOS: 78-85 of Table 6.

TABLE 6
Promoter sequences

| | SEQ | |
|---|---|---|
| | ID | |
| Name | NO | Sequence |
| CMV | 78 | CGTTACATAACTTACGGTAAATGGCCCGCCTGGCTGACCGCCCAACGACCCCC |
| | | GCCCATTGACGTCAATAATGACGTATGTTCCCATAGTAACGCCAATAGGGACT |
| | | TTCCATTGACGTCAATGGGTGGAGTATTTACGGTAAACTGCCCACTTGGCAGT |
| | | ACATCAAGTGTATCATATGCCAAGTACGCCCCCTATTGACGTCAATGACGGTA |
| | | AATGGCCCGCCTGGCATTATGCCCAGTACATGACCTTATGGGACTTTCCTACT |
| | | TGGCAGTACATCTACGTATTAGTCATCGCTATTACCATGGTGATGCGGTTTTG |
| | | GCAGTACATCAATGGGCGTGGATAGCGGTTTGACTCACGGGGATTTCCAAGTC |
| | | TCCACCCCATTGACGTCAATGGGAGTTTGTTTTGGCACCAAAATCAACGGGAC |
| | | TTTCCAAAATGTCGTAACAACTCCGCCCCATTGACGCAAATGGGCGGTAGGCG |
| | | TGTACGGTGGGAGGTCTATATAAGCAGAGCT |
| SCP | 79 | GTACTTATATAAGGGGGTGGGGGCGCGTTCGTCCTCAGTCGCGATCGAACACT |
| | | CGAGCCGAGCAGACGTGCCTACGGACCG |
| CMVe- | 80 | CGTTACATAACTTACGGTAAATGGCCCGCCTGGCTGACCGCCCAACGACCCCC |
| SCP | | GCCCATTGACGTCAATAATGACGTATGTTCCCATAGTAACGCCAATAGGGACT |
| | | TTCCATTGACGTCAATGGGTGGAGTATTTACGGTAAACTGCCCACTTGGCAGT |
| | | ACATCAAGTGTATCATATGCCAAGTACGCCCCCTATTGACGTCAATGACGGTA |
| | | AATGGCCCGCCTGGCATTATGCCCAGTACATGACCTTATGGGACTTTCCTACT |
| | | TGGCAGTACATCTACGTATTAGTCATCGCTATTACCATGGTACTTATATAAGG |
| | | GGGGGGGGCGCGTTCGTCCTCAGTCGCGATCGAACACTCGAGCCGAGCAGAC |
| | | GTGCCTACGGACCG |
| CMV | 81 | TCAATATTGGCCATTAGCCATATTATTCATTGGTTATATAGCATAAATCAATA |
| max | | TTGGCTATTGGCCATTGCATACGTTGTATCTATATCATAATATGTACATTTAT |
| | | ATTGGCTCATGTCCAATATGACCGCCATGTTGGCATTGATTATTGACTAGTTA |
| | | TTAATAGTAATCAATTACGGGGTCATTAGTTCATAGCCCATATATGGAGTTCC |
| | | GCGTTACATAACTTACGGTAAATGGCCCGCCTGGCTGACCGCCCAACGACCCC |
| | | CGCCCATTGACGTCAATAATGACGTATGTTCCCATAGTAACGCCAATAGGGAC |
| | | TTTCCATTGACGTCAATGGGTGGAGTATTTACGGTAAACTGCCCACTTGGCAG |
| | | TACATCAAGTGTATCATATGCCAAGTCCGCCCCCTATTGACGTCAATGACGGT |
| | | AAATGGCCCGCCTGGCATTATGCCCAGTACATGACCTTACGGGACTTTCCTAC |
| | | TTGGCAGTACATCTACGTATTAGTCATCGCTATTACCATGGTGATGCGGTTTT |
| | | GGCAGTACACCAATGGGCGTGGATAGCGGTTTGACTCACGGGGATTTCCAAGT |
| | | CTCCACCCCATTGACGTCAATGGGAGTTTGTTTTGGCACCAAAATCAACGGGA |
| | | CTTTCCAAAATGTCGTAATAACCCCGCCCCGTTGACGCAAATGGGCGGTAGGC |
| | | GTGTACGGTGGGAGGTCTATATAAGCAGAGGTCGTTTAGTGAACCGTCAGATC |
| | | ACTAGTAGCTTTATTGCGGTAGTTTATCACAGTTAAATTGCTAACGCAGTCAG |
| | | TGCTCGACTGATCACAGGTAAGTATCAAGGTTACAAGACAGGTTTAAGGAGGC |
| | | CAATAGAAACTGGGCTTGTCGAGACAGAGAAGATTCTTGCGTTTCTGATAGGC |
| | | ACCTATTGGTCTTACTGACATCCACTTTGCCTTTCTCTCCACAGGG |
| JET | 82 | GAATTCGGGCGGAGTTAGGGCGGAGCCAATCAGCGTGCGCCGTTCCGAAAGTT |
| | | GCCTTTTATGGCTGGGCGGAGAATGGGCGGTGAACGCCGATGATTATATAAGG |
| | | ACGCGCCGGGTGTGGCACAGCTAGTTCCGTCGCAGCCGGGATTTGGGTCGCGG |
| | | TTCTTGTTTGTGGATCCCTGTGATCGTCACTTGACA |
| CAG | 83 | ATCTCGACTAGTTATTAATAGTAATCAATTACGGGGTCATTAGTTCATAGCCC |
| | | ATATATGGAGTTCCGCGTTACATAACTTACGGTAAATGGCCCGCCTGGCTGAC |
| | | CGCCCAACGACCCCCGCCCATTGACGTCAATAATGACGTATGTTCCCATAGTA |
| | | ACGCCAATAGGGACTTTCCATTGACGTCAATGGGTGGAGTATTTACGGTAAAC |
| | | TGCCCACTTGGCAGTACATCAAGTGTATCATATGCCAAGTACGCCCCCTATTG |
| | | ACGTCAATGACGGTAAATGGCCCGCCTGGCATTATGCCCAGTACATGACCTTA |
| | | TGGGACTTTCCTACTTGGCAGTACATCTACGTATTAGTCATCGCTATTACCAT |
| | | GGTCGAGGTGAGCCCCACGTTCTGCTTCACTCTCCCCATCTCCCCCCCCTCCC |
| | | CACCCCCAATTTTGTATTTATTTATTTTTTAATTATTTTGTGCAGCGATGGGG |
| | | GCGGGGGGGGGGGGGGGGCGCGCGCCAGGCGGGGCGGGGCGGGGCGAGGGGCG |
| | | GGGCGGGGCGAGGCGGAGAGGTGCGGCGGCAGCCAATCAGAGCGGCGCGCTCC |
| | | GAAAGTTTCCTTTTATGGCGAGGCGGCGGCGGCGGCGGCCCTATAAAAAGCGA |
| | | AGCGCGCGGCGGGCGGGGAGTCGCTGCGACGCTGCCTTCGCCCCGTGCCCCGC |
| | | TCCGCCGCCGCCTCGCGCCGCCCGCCCCGGCTCTGACTGACCGCGTTACTCCC |
| | | ACAGGTGAGCGGGCGGGACGGCCCTTCTCCTCCGGGCTGTAATTAGCGCTTGG |
| | | TTTAATGACGGCTTGTTTCTTTTCTGTGGCTGCGTGAAAGCCTTGAGGGGCTC |
| | | CGGGAGGGCCCTTTGTGCGGGGGGAGCGGCTCGGGGGGTGCGTGCGTGTGTGT |
| | | GTGCGTGGGGAGCGCCGCGTGCGGCTCCGCGCTGCCCGGCGGCTGTGAGCGCT |
| | | GCGGGCGCGGCGCGGGGCTTTGTGCGCTCCGCAGTGTGCGCGAGGGGAGCGCG |
| | | GCCGGGGGCGGTGCCCCGCGGTGCGGGGGGGGCTGCGAGGGGAACAAAGGCTG |
| | | CGTGCGGGGTGTGTGCGTGGGGGGGTGAGCAGGGGGTGTGGGCGCGTCGGTCG |
| | | GGCTGCAACCCCCCCTGCACCCCCCTCCCCGAGTTGCTGAGCACGGCCCGGCT |
| | | TCGGGTGCGGGGCTCCGTACGGGGCGTGGCGCGGGGCTCGCCGTGCCGGGCGG |
| | | GGGGTGGCGGCAGGTGGGGGTGCCGGGCGGGGCGGGGCCGCCTCGGGCCGGGG |
| | | AGGGCTCGGGGGAGGGGCGCGGCGGCCCCCGGAGCGCCGGCGGCTGTCGAGGC |
| | | GCGGCGAGCCGCAGCCATTGCCTTTTATGGTAATCGTGCGAGAGGGCGCAGGG |
| | | ACTTCCTTTGTCCCAAATCTGTGCGGAGCCGAAATCTGGGAGGCGCCGCCGCA |
| | | CCCCCTCTAGCGGGCGCGGGGCGAAGCGGTGCGGCGCCGGCAGGAAGGAAATG |
| | | GGCGGGGAGGGCCTTCGTGCGTCGCCGCGCCGCCGTCCCCTTCTCCCTCTCCA |
| | | GCCTCGGGGCTGTCCGCGGGGGGACGGCTGCCTTCGGGGGGGACGGGGCAGGG |
| | | CGGGGTTCGGCTTCTGGCGTGTGACCGGCGGCTCTAGAGCCTCTGCTAACCAT |
| | | GTTCATGCCTTCTTCTTTTTCCTACAGCTCCTGGGCAACGTGCTGGTTATTGT |
| | | GCTGTCTCATCATTTTGGCAAAGAATT |
| PGK | 84 | GGGGTTGGGGTTGCGCCTTTTCCAAGGCAGCCCTGGGTTTGCGCAGGGACGCG |
| | | GCTGCTCTGGGCGTGGTTCCGGGAAACGCAGCGGCGCCGACCCTGGGTCTCGC |
| | | ACATTCTTCACGTCCGTTCGCAGCGTCACCCGGATCTTCGCCGCTACCCTTGT |
| | | GGGCCCCCCGGCGACGCTTCCTGCTCCGCCCCTAAGTCGGGAAGGTTCCTTGC |
| | | GGTTCGCGGCGTGCCGGACGTGACAAACGGAAGCCGCACGTCTCACTAGTACC |
| | | CTCGCAGACGGACAGCGCCAGGGAGCAATGGCAGCGCGCCGACCGCGATGGGC |
| | | TGTGGCCAATAGCGGCTGCTCAGCAGGGCGCGCCGAGAGCAGCGGCCGGGAAG |
| | | GGGCGGTGCGGGAGGCGGGGTGTGGGGCGGTAGTGTGGGCCCTGTTCCTGCCC |
| | | GCGCGGTGTTCCGCATTCTGCAAGCCTCCGGAGCGCACGTCGGCAGTCGGCTC |
| | | CCTCGTTGACCGAATCACCGACCTCTCTCCCCAG |
| EF- | 85 | GAATTCAGGCTCCGGTGCCCGTCAGTGGGCAGAGCGCACATCGCCCACAGTCC |
| 1a | | CCGAGAAGTTGGGGGGAGGGGTCGGCAATTGAACCGGTGCCTAGAGAAGGTGG |
| | | CGCGGGGTAAACTGGGAAAGTGATGTCGTGTACTGGCTCCGCCTTTTTCCCGA |
| | | GGGTGGGGGAGAACCGTATATAAGTGCAGTAGTCGCCGTGAACGTTCTTTTTC |
| | | GCAACGGGTTTGCCGCCAGAACACAGGTAAGTGCCGTGTGTGGTTCCCGCGGG |
| | | CCTGGCCTCTTTACGGGTTATGGCCCTTGCGTGCCTTGAATTACTTCCACCTG |
| | | GCTGCAGTACGTGATTCTTGATCCCGAGCTTCGGGTTGGAAGTGGGTGGGAGA |
| | | GTTCGAGGCCTTGCGCTTAAGGAGCCCCTTCGCCTCGTGCTTGAGTTGAGGCC |
| | | TGGCCTGGGCGCTGGGGCCGCCGCGTGCGAATCTGGTGGCACCTTCGCGCCTG |
| | | TCTCGCTGCTTTCGATAAGTCTCTAGCCATTTAAAATTTTTGATGACCTGCTG |
| | | CGACGCTTTTTTTCTGGCAAGATAGTCTTGTAAATGCGGGCCAAGATCTGCAC |
| | | ACTGGTATTTCGGTTTTTGGGGCCGCGGGCGGCGACGGGGCCCGTGCGTCCCA |
| | | GCGCACATGTTCGGCGAGGCGGGGCCTGCGAGCGCGGCCACCGAGAATCGGAC |
| | | GGGGGTAGTCTCAAGCTGGCCGGCCTGCTCTGGTGCCTGGTCTCGCGCCGCCG |
| | | TGTATCGCCCCGCCCTGGGCGGCAAGGCTGGCCCGGTCGGCACCAGTTGCGTG |
| | | AGCGGAAAGATGGCCGCTTCCCGGCCCTGCTGCAGGGAGCTCAAAATGGAGGA |
| | | CGCGGCGCTCGGGAGAGCGGGCGGGTGAGTCACCCACACAAAGGAAAAGGGCC |
| | | TTTCCGTCCTCAGCCGTCGCTTCATGTGACTCCACGGAGTACCGGGCGCCGTC |
| | | CAGGCACCTCGATTAGTTCTCGAGCTTTTGGAGTACGTCGTCTTTAGGTTGGG |
| | | GGGAGGGGTTTTATGCGATGGAGTTTCCCCACACTGAGTGGGTGGAGACTGAA |
| | | GTTAGGCCAGCTTGGCACTTGATGTAATTCTCCTTGGAATTTGCCCTTTTTGA |
| | | GTTTGGATCTTGGTTCATTCTCAAGCCTCAGACAGTGGTTCAAAGTTTTTTTC |
| | | TTCCATTTCAGGTGTCGTGACATCATTTT |

### D. Efficiency and Specificity

[0266] An engineered, non-naturally occurring system can be evaluated in terms of efficiency and/or specificity in nucleic acid targeting, cleavage, or modification.

[0267] In certain embodiments, an engineered, non-naturally occurring system has high efficiency. For example, in certain embodiments, at least 1, 1.5, 2, 2.5, 3, 4, 5, 10, 15, 20, 25, 30, 35, 40, 45, 50, 55, 60, 65, 70, 75, 80, 85, 90, 95, 96, 97, 98, 99, or 100% of a population of nucleic acids having the target nucleotide sequence and a cognate PAM, when contacted with the engineered, non-naturally occurring system, is targeted, cleaved, or modified. In certain embodiments, the genomes of at least 5, 10, 15, 20, 25, 30, 35, 40, 45, 50, 55, 60, 65, 70, 75, 80, 85, 90, 95, 96, 97, 98, 99, or 100% of a population of cells, when the engineered, non-naturally occurring system is delivered into the cells, are targeted, cleaved, or modified.

[0268] It has been observed that for a given spacer sequence, the occurrence of on-target events and the occurrence of off-target events are generally correlated. For certain therapeutic purposes, lower on-target efficiency can be tolerated and low off-target frequency is more desirable. For example, when editing or modifying a proliferating cell that will be delivered to a subject and proliferate in vivo, tolerance to off-target events is low. Prior to delivery, it is possible to assess the on-target and off-target events, thereby selecting one or more colonies that have the desired edit or modification and lack any undesired edit or modification. Notwithstanding, the on-target efficiency may need to meet a certain standard to be suitable for therapeutic use. High editing efficiency in a standard CRISPR-Cas system allows tuning of the system, for example, by reducing the binding of the guide nucleic acids to the Cas protein, without losing therapeutic applicability.

[0269] In certain embodiments, when a population of nucleic acids having the target nucleotide sequence and a cognate PAM is contacted with the engineered, non-naturally occurring system disclosed herein, the frequency of off-target events (e.g., targeting, cleavage, or modification, depending on the function of the CRISPR-Cas system) is reduced. Methods of assessing off-target events were summarized in Lazzarotto et al. (2018) NAT PROTOC. 13 (11): 2615-42, and include discovery of in situ Cas off-targets and verification by sequencing (DISCOVER-seq) as disclosed in Wienert et al. (2019) SCIENCE 364 (6437): 286-89; genome-wide unbiased identification of double-stranded breaks (DSBs) enabled by sequencing (GUIDE-seq) as disclosed in Kleinstiver et al. (2016) NAT. BIOTECH. 34:869-74; circularization for in vitro reporting of cleavage effects by sequencing (CIRCLE-seq) as described in Kocak et al. (2019) NAT. BIOTECH. 37:657-66. In certain embodiments, the off-target events include targeting, cleavage, or modification at a given off-target locus (e.g., the locus with the highest occurrence of off-target events detected). In certain embodiments, the off-target events include targeting, cleavage, or modification at all the loci with detectable off-target events, collectively.

[0270] In certain embodiments, genomic mutations are detected in no more than 0.0001%, 0.0002%, 0.0003%, 0.0004%, 0.0005%, 0.0006%, 0.0007%, 0.0008%, 0.0009%, 0.001%, 0.002%, 0.003%, 0.004%, 0.005%, 0.006%, 0.007%, 0.008%, 0.009%, 0.01%, 0.02%, 0.03%, 0.04%, 0.05%, 0.06%, 0.07%, 0.08%, 0.09%, 0.1%, 0.2%, 0.3%, 0.4%, 0.5%, 0.6%, 0.7%, 0.8%, 0.9%, 1%, 2%, 3%, 4%, or 5% of the cells at any off-target loci (in aggregate). In certain embodiments, the ratio of the percentage of cells having an on-target event to the percentage of cells having any off-target event (e.g., the ratio of the percentage of cells having an on-target editing event to the percentage of cells having a mutation at any off-target loci) is at least 10, 20, 30, 40, 50, 60, 70, 80, 90, 100, 200, 300, 400, 500, 600, 700, 800, 900, 1000, 2000, 3000, 4000, 5000, 6000, 7000, 8000, 9000, or 10000. It is understood that genetic variation may be present in a population of cells, for example, by spontaneous mutations, and such mutations are not included as off-target events.

### E. Multiplexing

[0271] The method of targeting, editing, and/or modifying a genomic DNA disclosed herein can be conducted in multiplicity. For example, a library of targeter nucleic acids can be used to target multiple genomic loci; a library of donor templates can also be used to generate multiple insertions, deletions, and/or substitutions. The multiplex assay can be conducted in a screening method wherein each separate cell culture (e.g., in a well of a 96-well plate or a 384-well plate) is exposed to a different guide nucleic acid having a different targeter stem sequence and/or a different donor template. The multiplex assay can also be conducted in a selection method wherein a cell culture is exposed to a mixed population of different guide nucleic acids and/or donor templates, and the cells with desired characteristics (e.g., functionality) are enriched or selected by advantageous survival or growth, resistance to a certain agent, expression of a detectable protein (e.g., a fluorescent protein that is detectable by flow cytometry), etc.

[0272] In certain embodiments, the plurality of guide nucleic acids and/or the plurality of donor templates are designed for saturation editing. For example, in certain embodiments, each nucleotide position in a sequence of interest is systematically modified with each of all four traditional bases, A, T, G and C. In other embodiments, at least one sequence in each gene from a pool of genes of interest is modified, for example, according to a CRISPR design algorithm. In certain embodiments, each sequence from a pool of exogenous elements of interest (e.g., protein coding sequences, non-protein coding genes, regulatory elements) is inserted into one or more given loci of the genome.

[0273] It is understood that the multiplex methods suitable for the purpose of carrying out a screening or selection method, which is typically conducted for research purposes, may be different from the methods suitable for therapeutic purposes. For example, constitutive expression of certain elements (e.g., a Cas nuclease and/or a guide nucleic acid) may be undesirable for therapeutic purposes due to the potential of increased off-targeting. Conversely, for research purposes, constitutive expression of a Cas nuclease and/or a guide nucleic acid may be desirable. For example, the constitutive expression provides a large window during which other elements can be introduced. When a stable cell line is established for the constitutive expression, the number of exogenous elements that need to be co-delivered into a single cell is also reduced. Therefore, constitutive expression of certain elements can increase the efficiency and reduce the complexity of a screening or selection process. Inducible expression of certain elements of the system disclosed herein may also be used for research purposes given similar advantages. Expression may be induced by an exogenous agent (e.g., a small molecule) or by an endogenous molecule or complex present in a particular cell type (e.g., at a particular stage of differentiation). Methods known in the art, such as those described herein, can be used for constitutively or inducibly expressing one or more elements. For example, the specificity of CRISPR nucleases is at least partially dictated by the uniqueness of the spacer (in combination with spacer sequence's proximity to a requisite PAM) and its off-target score can be calculated with algorithms, such as crispr.mit.edu (Hsu et al. (2013) NAT. BIOTECH. 31:827-832). The highest possible score is 100, which shows probability for high specificity and few off targets. Because our SHS library targets intergenic regions, the algorithm for gRNA prediction should be able to make alignments with repeated regions and low-complexity sequences.

[0274] It is further understood that despite the need to introduce multiple elements—the single guide nucleic acid and the Cas protein; or the targeter nucleic acid, the modulator nucleic acid, and the Cas protein—these elements can be delivered into the cell as a single complex of pre-formed RNP. Therefore, the efficiency of the screening or selection process can also be achieved by pre-assembling a plurality of RNP complexes in a multiplex manner.

[0275] In certain embodiments, the method disclosed herein further comprises a step of identifying a guide nucleic acid, a Cas protein, a donor template, or a combination of two or more of these elements from the screening or selection process. A set of barcodes may be used, for example, in the donor template between two homology arms, to facilitate the identification. In specific embodiments, the method further comprises harvesting the population of cells; selectively amplifying a genomic DNA or RNA sample including the target nucleotide sequence(s) and/or the barcodes; and/or sequencing the genomic DNA or RNA sample and/or the barcodes that has been selectively amplified.

[0276] In addition, the present invention provides a library comprising a plurality of guide nucleic acids, such as a plurality of guide nucleic acids disclosed herein. In another aspect, the present invention provides a library comprising a plurality of nucleic acids each comprising a regulatory element operably linked to a different guide nucleic acid such as a different guide nucleic acid disclosed herein. These libraries can be used in combination with one or more Cas proteins or Cas-coding nucleic acids, such as disclosed herein, and/or one or more donor templates, such as disclosed herein, for a screening or selection method.

### F. Genomic Safe Harbors

[0277] Genome engineering is an area of research seeking to modify genes of living organisms to improve our understanding of gene function and to develop methods for genome engineering that treat genetic or acquired diseases, among many others. To modify the genome of target cells, skilled artisans use one or more available tools to introduce changes into the genome at targeted locations to modify the sequence of a target polynucleotide, e.g., a target gene, in desired ways, e.g., modulate gene expression, modulate gene sequences, remove gene sequences, introduce genes, e.g., exogenous DNA, e.g., transgenes, and the like. Efficient transgene insertion may be accomplished through non-precise methods including but not limited to viral vectors, such as, retroviral vectors, e.g., adeno-associated virus (AAV) and the like, or precise methods including but not limited to guided nucleases, such as, zinc finger nucleases (ZFNs), transcription activator-like effector nucleases (TALENs), homing endonucleases, e.g., restriction endonucleases, or nucleic acid-guided nuclease, e.g., CRISPR-cas, e.g., Cas9 and Cas12a and engineered versions thereof.

[0278] Exogenous genes, e.g., transgenes, inserted into the genome of a target human cell either randomly, e.g., through retroviral vectors, or in a targeted manner, e.g., through the action of a nucleic acid-guided nuclease, such as Cas, may interact with other genomic elements in unpredictable ways. Due to the complex transcriptional regulation of genes in mammalian cells through networks of cis and trans regulatory elements, such as proximal and distal enhancers, and multiple transcription factors, attempts to alter the default genomic architecture by integration of exogenous DNA, e.g., transgenes, or synthetic sequences can affect the expression of the transgene itself leading to complete attenuation or complete silencing, and/or the expression of both nearby and distant endogenous genes that can, e.g., compromise the safety checkpoints that healthy cells have including dysregulation of expression of key genes, such as oncogenes and tumor suppressor genes, that can alter cellular behavior in dramatic ways, i.e., promoting clonal expansion or malignant transformation of the host.

[0279] Gene integration next to regulatory elements of proto-oncogenes has been shown to cause oncogenic transformation, which is particularly important when engineering cells for therapeutic applications. Therefore, the identification of suitable target polynucleotide comprising a target nucleotide sequence in the human genome wherein the insertion of a transgene leads to suitable expression of the transgene without disruption of neighboring genes is desired. In particular, for gene and cell therapy applications, suitable target polynucleotide comprising a target nucleotide sequence in the human genome wherein the insertion of a transgene leads to sufficient expression of the transgene in a therapeutic cell e.g., a T cell, e.g., a CAR T cell; or precursor cell, e.g., a stem cell, such as a hematopoietic stem cell, without malignant transformation or any other disruption that would be harmful to an individual after implantation is desired.

[0280] Expression of exogenous genes, e.g., transgenes, in desired cell types and/or developmental/differentiation stages relies on integration into suitable target polynucleotide comprising a target nucleotide sequence that results in sufficient expression, to a degree sufficient for the intended purpose, from the candidate locus. Expression from a specific genomic site can be affected by many factors including but not limited to cell type and differentiation stage, as one or more components of the target polynucleotide get activated during differentiation while others get silenced, and changes in chromatin architecture. Therefore, the identification of suitable target polynucleotides comprising a target nucleotide sequence in the human genome wherein insertion of exogenous DNA, e.g., a transgene, leads to sufficient expression in the target human cell, and, in the case of stem cells, the expression is maintained at a sufficient level through (1) differentiation and (2) through clonal expansion is desired. The current disclosure provides significant advances in the ability engineer human genomes by providing compositions and methods for targeting and delivering exogenous genes, e.g., transgenes, to the suitable target polynucleotide comprising a target nucleotide sequence.

[0281] Provided herein are compositions and methods for genome engineering. Certain embodiments comprise compositions. Certain embodiments comprise composition for editing genomes. embodiments disclosed herein concern novel guide nucleic acids (gNAs), e.g., gRNAs, that are complementary to a target nucleotide sequence in a target polynucleotide. As used herein, a “target polynucleotide,” includes a polynucleotide in which a target nucleotide sequence is located. As used herein, a “target nucleotide sequence” includes a sequence to which a guide sequence can bind, e.g., has complementarity to, where binding between a target nucleotide sequence and a guide sequence may allow the activity of a nucleic acid-guided nuclease complex. Further embodiments disclosed herein concern novel gNAs, e.g., gRNAs, that are complementary to a target nucleotide sequence in a target polynucleotide into which insertion of exogenous DNA, e.g., a transgene, doesn't negatively affect the cell, e.g., significantly affect the expression of one or more endogenous genes or result in a malignant transformation of the cell. In further embodiments disclosed herein, gene expression demonstrated in the human target cell is maintained through differentiation of the human target cell and/or through proliferation in the one or more progeny cells at a level sufficient for the ultimate use of the cells. Certain embodiments disclosed herein concern novel nucleic acid-guided nuclease complexes, e.g., RNPs, such as Cas bound to a gNA, that are complementary to a target nucleotide sequence within a target polynucleotide and hydrolyze the phosphodiester back bone (also referred as cleave or cut) in at least one position on at least one strand of the target polynucleotide. Certain embodiments disclosed herein concern methods for selecting and using gNAs, e.g., gRNAs, for genome engineering. Certain embodiments concern methods for using gNAs that are complementary to a target nucleotide sequence within a target polynucleotide, synthesizing the gNA and nucleic-acid-guided nuclease, and/or combining the nucleic guided nuclease with the gNA to form a nucleic acid-guided nuclease complex, e.g., RNP. Certain embodiments disclosed herein concern methods. Certain embodiments disclosed herein concern methods for engineering genomes. Certain embodiments disclosed herein concern methods where a nucleic acid-guided nuclease complex, e.g., RNP, is introduced, e.g., transfected, into a human target cell along with a donor template, e.g., an exogenous DNA, e.g., a transgene, in which the nucleic-acid guided nuclease cleaves the backbone at a least one position in at least one of the strands of the target polynucleotide and the donor template is used to repair the cleaved target polynucleotide, introducing at least a portion of the donor template into the target polynucleotide. As used herein, “exogenous DNA” or a “transgene” includes any gene, natural or synthetic, which is introduced into the genome of an organism or cell to which it is not endogenous. The transgene may or may not retain the ability to be expressed and/or produce RNA or protein in the human target cell. The transgene may or may not alter the resulting phenotype of the human target cell. Certain embodiments include human target cells, e.g., a eukaryotic cell, e.g., a mammalian cell, such as a human cell, for example a stem cell or an immune cell, generated through a method where the nucleic acid-guided nuclease complex, e.g., RNP, is introduced, e.g., transfected, into a human target cell along with a donor template, e.g., as an exogenous DNA or a transgene, such as a chimeric antigen receptor (CAR), in which the nucleic-acid guided nuclease cleaves at or near a targets sequence in a target polynucleotide and the donor template is used to repair the cleaved target polynucleotide introducing at least a portion of the donor template into the target polynucleotide. Certain embodiments disclosed herein include promoter sequences adjacent to an exogenous gene, e.g., a transgene; in certain cases, constructs including the promoter, when introduced into a target polynucleotide of a human target cell, e.g., an immune cell or a stem cell, maintain sufficient gene expression in the edited human target cell for the intended purpose of the cell or its progeny. In certain embodiments, the human target cell is viable after introduction of the exogenous DNA.

[0282] As used herein, a “human target cell” includes a cell into which an exogenous product, e.g., a protein, a nucleic acid, or a combination thereof, has been introduced. In certain cases, a human target cell may be used to produce a gene product from an exogenous DNA, e.g., a transgene, such as an exogenous protein, e.g., a CAR. In certain cases, a human target cell may comprise a target nucleotide sequence within target polynucleotide wherein a nucleic acid-guided nuclease hybridizes and cleaves at a site of cleavage at one or more positions on one or more strands of the target polynucleotide at or near the target nucleotide sequence.

[0283] As used herein, a “site of cleavage” includes the location or locations at which a nucleic acid-guided nuclease complex will hydrolyze the phosphodiester backbone of a single-stranded or double-stranded target polynucleotide, after binding at a target nucleotide sequence in the target polynucleotide. In certain cases in which the target polynucleotide of a nucleic acid-guided nuclease complex is double stranded, binding of the nucleic acid-guided nuclease complex to a target nucleotide sequence within the target polynucleotide can result in hydrolysis of one of the strands of the target polynucleotide at or near the target nucleotide sequence, resulting in strand cleavage. In such a case, the nucleic acid-guided nuclease complex can cleave either strand of the target polynucleotide. In certain cases, binding of the nucleic acid-guided nuclease complex to a target nucleotide sequence within a target polynucleotide can result in hydrolysis of both strands of the target polynucleotide at or near the target nucleotide sequence, resulting in cleavage of both strands. The sites of cleavage can be the same for both strands, resulting in a blunt end, or the sites of cleavage for each strand can be offset resulting in single strand overhangs, e.g., sticky ends. In certain cases, mismatches at or near the site of cleavage may or may not affect the cleavage efficiency of the nucleic acid-guided nuclease complex.

[0284] In certain cases, uncontrolled gene integration next to regulatory elements of proto-oncogenes has been shown to cause oncogenic transformation, which is particularly important.

[0285] when engineering cells for therapeutic applications. Therefore, it is desired to identify suitable target polynucleotides comprising target nucleotide sequences that result in safe, stable integration of exogenous DNA with sufficient expression in a human target cell and its resultant progeny.

[0286] Exemplary characteristics of a target nucleotide sequence that can demonstrate predictable function without potentially harmful alterations in human target cell genomic activity include one or more of (1) >150 kb, for example, >200, such as >250, and in some cases >300 kb away from a known cancer-related gene, (2) >150 kb, for example, >200, such as >250, and in some cases >300 kb away from any miRNA/other functional small RNA, (3) >10 kb, for example, >20, such as >30, and in some cases >50 kb away from any 5′ gene end, (4) >10 kb, for example, >20, such as >30, and in some cases >50 kb away from any replication origin, (5) >10 kb, for example, >20, such as >30, and in some cases >50 kb away from any ultra-conserved element, (6) demonstrating low transcriptional activity, (7) outside of a copy number variable region, (8) located in open chromatin, and (9) unique, i.e., 1 copy per genome.

[0287] In certain embodiments, provided herein are compositions. In certain embodiments, provided herein are compositions for engineering a human target cell at suitable target nucleotide sequences within a target polynucleotide of the human target cell.

[0288] In certain embodiments, a suitable target polynucleotide that comprises a target nucleotide sequence has at least one of the exemplary characteristics. In certain embodiments, a suitable target polynucleotide that comprises a target nucleotide sequence has at least two of the exemplary characteristics. In certain embodiments, a suitable target polynucleotide that comprises a target nucleotide sequence has at least three of the exemplary characteristics. In certain embodiments, a suitable target polynucleotide that comprises a target nucleotide sequence has at least four of the exemplary characteristics. In certain embodiments, a suitable target polynucleotide that comprises a target nucleotide sequence has at least five of the exemplary characteristics. In certain embodiments, a suitable target polynucleotide that comprises a target nucleotide sequence has at least six of the exemplary characteristics. In certain embodiments, a suitable target polynucleotide that comprises a target nucleotide sequence has at least seven of the exemplary characteristics. In certain embodiments, a suitable target polynucleotide that comprises a target nucleotide sequence has at least eight of the exemplary characteristics. In certain embodiments, a suitable target polynucleotide that comprises a target nucleotide sequence has all the exemplary characteristics.

[0289] In certain embodiments, a suitable target polynucleotide is >10 kb, for example, >20, such as >30, and in some cases >50 kb away from any 5′ gene end. In certain embodiments, a suitable target polynucleotide is >10 kb, for example, >20, such as >30, and in some cases >50 kb away from any 5′ gene end and further comprises at one additional exemplary characteristic. In certain embodiments, a suitable target polynucleotide is >10 kb, for example, >20, such as >30, and in some cases >50 kb away from any 5′ gene end and further comprises at least two additional exemplary characteristics. In certain embodiments, a suitable target polynucleotide is >10 kb, for example, >20, such as >30, and in some cases >50 kb away from any 5′ gene end and further comprises at least three additional exemplary characteristics. In certain embodiments, a suitable target polynucleotide is >10 kb, for example, >20, such as >30, and in some cases >50 kb away from any 5′ gene end and further comprises at least four additional exemplary characteristics. In certain embodiments, a suitable target polynucleotide is >10 kb, for example, >20, such as >30, and in some cases >50 kb away from any 5′ gene end and further comprises at least five additional exemplary characteristics. In certain embodiments, a suitable target polynucleotide is >10 kb, for example, >20, such as >30, and in some cases >50 kb away from any 5′ gene end and further comprises at least six additional exemplary characteristics. In certain embodiments, a suitable target polynucleotide is >10 kb, for example, >20, such as >30, and in some cases >50 kb away from any 5′ gene end and further comprises at least seven additional exemplary characteristics. In certain embodiments, a suitable target polynucleotide is >10 kb, for example, >20, such as >30, and in some cases >50 kb away from any 5′ gene end and further comprises all eight additional exemplary characteristics.

[0290] In certain embodiments, a suitable target polynucleotide is >150 kb, for example, >200, such as >250, and in some cases >300 kb away from a known cancer-related gene. In certain embodiments, a suitable target polynucleotide is >150 kb, for example, >200, such as >250, and in some cases >300 kb away from a known cancer-related gene and further comprises at one additional exemplary characteristic. In certain embodiments, a suitable target polynucleotide is >150 kb, for example, >200, such as >250, and in some cases >300 kb away from a known cancer-related gene and further comprises at least two additional exemplary characteristics. In certain embodiments, a suitable target polynucleotide is >150 kb, for example, >200, such as >250, and in some cases >300 kb away from a known cancer-related gene and further comprises at least three additional exemplary characteristics. In certain embodiments, a suitable target polynucleotide is >150 kb, for example, >200, such as >250, and in some cases >300 kb away from a known cancer-related gene and further comprises at least four additional exemplary characteristics. In certain embodiments, a suitable target polynucleotide is >150 kb, for example, >200, such as >250, and in some cases >300 kb away from a known cancer-related gene and further comprises at least five additional exemplary characteristics. In certain embodiments, a suitable target polynucleotide is >150 kb, for example, >200, such as >250, and in some cases >300 kb away from a known cancer-related gene and further comprises at least six additional exemplary characteristics. In certain embodiments, a suitable target polynucleotide is >150 kb, for example, >200, such as >250, and in some cases >300 kb away from a known cancer-related gene and further comprises at least seven additional exemplary characteristics. In certain embodiments, a suitable target polynucleotide is >150 kb, for example, >200, such as >250, and in some cases >300 kb away from a known cancer-related gene and further comprises all eight additional exemplary characteristics.

[0291] In certain embodiments, a suitable target polynucleotide is >150 kb, for example, >200, such as >250, and in some cases >300 kb away from a known cancer-related gene, and >10 kb, for example, >20, such as >30, and in some cases >50 kb away from any 5′ gene end. In certain embodiments, a suitable target polynucleotide is >150 kb, for example, >200, such as >250, and in some cases >300 kb away from a known cancer-related gene, >10 kb, for example, >20, such as >30, and in some cases >50 kb away from any 5′ gene end, and further comprises at least one additional exemplary characteristic. In certain embodiments, a suitable target polynucleotide is >150 kb, for example, >200, such as >250, and in some cases >300 kb away from a known cancer-related gene, >10 kb, for example, >20, such as >30, and in some cases >50 kb away from any 5′ gene end, and further comprises at least two additional exemplary characteristics. In certain embodiments, a suitable target polynucleotide is >150 kb, for example, >200, such as >250, and in some cases >300 kb away from a known cancer-related gene, >10 kb, for example, >20, such as >30, and in some cases >50 kb away from any 5′ gene end, and further comprises at least three additional exemplary characteristics. In certain embodiments, a suitable target polynucleotide is >150 kb, for example, >200, such as >250, and in some cases >300 kb away from a known cancer-related gene, >10 kb, for example, >20, such as >30, and in some cases >50 kb away from any 5′ gene end, and further comprises at least four additional exemplary characteristics. In certain embodiments, a suitable target polynucleotide is >150 kb, for example, >200, such as >250, and in some cases >300 kb away from a known cancer-related gene, >10 kb, for example, >20, such as >30, and in some cases >50 kb away from any 5′ gene end, and further comprises at least five additional exemplary characteristics. In certain embodiments, a suitable target polynucleotide is >150 kb, for example, >200, such as >250, and in some cases >300 kb away from a known cancer-related gene, >10 kb, for example, >20, such as >30, and in some cases >50 kb away from any 5′ gene end, and further comprises at least six additional exemplary characteristics. In certain embodiments, a suitable target polynucleotide is >150 kb, for example, >200, such as >250, and in some cases >300 kb away from a known cancer-related gene, >10 kb, for example, >20, such as >30, and in some cases >50 kb away from any 5′ gene end, and further comprises all seven additional exemplary characteristics.

[0292] In a preferred embodiment, a suitable target polynucleotide is >10 kb, for example, >20, such as >30, and in some cases >50 kb away from any 5′ gene end and >150, for example, >200, such as >250, and in some cases >300 kb away from a known cancer-related gene.

[0293] In certain embodiments, a suitable target polynucleotide comprising a target nucleotide sequence, e.g., for transgene insertion, may comprise any one of SEQ ID NOs: 2020-2043 of Table 7. In certain embodiments, a suitable target polynucleotide comprising a target nucleotide sequence is at least 90%, at least 91%, at least 92%, at least 93%, at least 94%, at least 95%, at least 96%, at least 97%, at least 98%, at least 99%, at least 99.1%, at least 99.2%, at least 99.3%, at least 99.4%, at least 99.5%, at least 99.6%, at least 99.7%, at least 99.8%, at least 99.9%, or completely identical to any one of SEQ ID NOs: 2020-2043. In a preferred embodiment, a suitable target polynucleotide comprising a target nucleotide sequence is at least 98% identical to any one of SEQ ID NOs: 2020-2043. In a more preferred embodiment, a suitable target polynucleotide comprising a target nucleotide sequence is at least 99% identical to any one of SEQ ID NOs: 2020-2043.

[0294] In certain embodiments, a suitable target polynucleotide comprising a target nucleotide sequence, e.g., for transgene insertion, may comprise any one of SEQ ID NOs: 2020-2042 of Table 7. In certain embodiments, a suitable target polynucleotide comprising a target nucleotide sequence is at least 90%, at least 91%, at least 92%, at least 93%, at least 94%, at least 95%, at least 96%, at least 97%, at least 98%, at least 99%, at least 99.1%, at least 99.2%, at least 99.3%, at least 99.4%, at least 99.5%, at least 99.6%, at least 99.7%, at least 99.8%, at least 99.9%, or completely identical to any one of SEQ ID NOs: 2020-2042. In a preferred embodiment, a suitable target polynucleotide comprising a target nucleotide sequence is at least 98% identical to any one of SEQ ID NOs: 2020-2042. In a more preferred embodiment, a suitable target polynucleotide comprising a target nucleotide sequence is at least 99% identical to any one of SEQ ID NOs: 2020-2042.

[0295] In certain embodiments, a suitable target polynucleotide comprising a target nucleotide sequence, e.g., for transgene insertion, may comprise any one of SEQ ID NOs: 2020-2041 and 2043 of Table 7. In certain embodiments, a suitable target polynucleotide comprising a target nucleotide sequence is at least 90%, at least 91%, at least 92%, at least 93%, at least 94%, at least 95%, at least 96%, at least 97%, at least 98%, at least 99%, at least 99.1%, at least 99.2%, at least 99.3%, at least 99.4%, at least 99.5%, at least 99.6%, at least 99.7%, at least 99.8%, at least 99.9%, or completely identical to any one of SEQ ID NOs: 2020-2041 and 2043. In a preferred embodiment, a suitable target polynucleotide comprising a target nucleotide sequence is at least 98% identical to any one of SEQ ID NOs: 2020-2041 and 2043. In a more preferred embodiment, a suitable target polynucleotide comprising a target nucleotide sequence is at least 99% identical to any one of SEQ ID NOs: 2020-2041 and 2043.

[0296] In certain embodiments, a suitable target polynucleotide comprising a target nucleotide sequence, e.g., for transgene insertion, may comprise any one of SEQ ID NOs: 2020-2041 of Table 7. In certain embodiments, a suitable target polynucleotide comprising a target nucleotide sequence is at least 90%, at least 91%, at least 92%, at least 93%, at least 94%, at least 95%, at least 96%, at least 97%, at least 98%, at least 99%, at least 99.1%, at least 99.2%, at least 99.3%, at least 99.4%, at least 99.5%, at least 99.6%, at least 99.7%, at least 99.8%, at least 99.9%, or completely identical to any one of SEQ ID NOs: 2020-2041. In a preferred embodiment, a suitable target polynucleotide comprising a target nucleotide sequence is at least 98% identical to any one of SEQ ID NOs: 2020-2041. In a more preferred embodiment, a suitable target polynucleotide comprising a target nucleotide sequence is at least 99% identical to any one of SEQ ID NOs: 2020-2041.

[0297] In certain embodiments, a suitable target polynucleotide comprising a target nucleotide sequence, e.g., for transgene insertion, may comprise at least a portion of, for example, nucleotides 1-495, 1-490, 1-485, 1-480, 1-475, 1-470, 1-465, 1-460, 1-455, 1-450, 1-445, 1-440, 1-435, 1-430, 1-425, 1-420, 1-415, 1-410, 1-405, or 1-400, of any one of SEQ ID NOs: 2020-2030 of Table 7. In certain embodiments, a suitable target polynucleotide comprising a target nucleotide sequence is at least 90%, at least 91%, at least 92%, at least 93%, at least 94%, at least 95%, at least 96%, at least 97%, at least 98%, at least 99%, at least 99.1%, at least 99.2%, at least 99.3%, at least 99.4%, at least 99.5%, at least 99.6%, at least 99.7%, at least 99.8%, at least 99.9%, or completely identical to the portion of any one of SEQ ID NOs: 2020-2030.

[0298] In certain embodiments, a suitable target polynucleotide comprising a target nucleotide sequence, e.g., for transgene insertion, may comprise at least a portion of, for example, nucleotides 5-500, 10-500, 15-500, 20-500, 25-500, 30-500, 35-500, 40-500, 45-500, 50-500, 55-500, 60-500, 65-500, 70-500, 75-500, 80-500, 85-500, 90-500, 95-500, or 100-500, of any one of SEQ ID NOs: 2031-2041 of Table 7. In certain embodiments, a suitable target polynucleotide comprising a target nucleotide sequence is at least 90%, at least 91%, at least 92%, at least 93%, at least 94%, at least 95%, at least 96%, at least 97%, at least 98%, at least 99%, at least 99.1%, at least 99.2%, at least 99.3%, at least 99.4%, at least 99.5%, at least 99.6%, at least 99.7%, at least 99.8%, at least 99.9%, or completely identical to the portion of any one of SEQ ID NOs: 2031-2041.

TABLE 7
suitable target polynucleotides comprising a target nucleotide sequence for
transgene insertion

| SEQ ID NO | Sequence |
|---|---|
| 2020 | GCCTCCCAAAGTGCTGAGATTATGGGCATGAGCCACCGCACCTGGCCCTGAC |
| | AAGAACCTTTGAGTTAGGTATAATGGTTCACCCCAATTTATAGATAATGAAC |
| | CCAAGTCACAGGGGAAGTGAAGTCAGTTGCCTAAGGTCAGACAGCAGTAAAT |
| | GGTTCTCTGACCCTAACTCCACTGCCTCCCTCTCATAAAAACACTGGGTGGT |
| | TACAGTGGGCCCACCTGGAGAAGTCAAGCTATTCTCTCCATCTCAAGAACAT |
| | TAATTTAATCATCCTTTTTACCATATAAGATAACATCTTCACAGGTTCTGAG |
| | GATGAGAATGTTGACATCTTTGGGTGGTCGTTATTCAGCCTATCACAGGTAT |
| | CCAGGGAAGAAAAAAGGAATTTCCAAAAAGAGAAAATACGAACATTGGGAAG |
| | GCTAATTACAGATGGTGACTACTGAAGGGTTAGTCAGAAGCATAATGGAGGC |
| | AGTGATGAGATGACAGCACAGATGCATGACTCTAGTCCCAGCAACTCCTAAA |
| | AGGTAAAGAAATGTATCCTGCCACCCTCAGCTTCTTTGGGGTGTCCTCATAA |
| | AAGAGAGGCAGTAAAGCAGAATCAGAGTCAGATAGAGAGGTTGTAAGAAGAG |
| | AAGCAGAGGTGAGTAAGCTGTGTTTCAAACCCAGAGTCAAGGCTCTTGCCCC |
| | TCTGCGGTGCTGCCGAAGCCCAGGGTGGGTGGGGACTGACATGCAACTCAGG |
| | TACTGTGTGGCAGACTTTGTGCCTTGGCATGAAACTATGCCTGCCCACAGGA |
| | AGGGGCACCATTTTCTCATTAGCTCAAAGAGACTTCTGCTGGCCAATTCCTG |
| | TCTTCTCAATACTGCAGCTCTCCAGAGACAACACTGTTCTCTATTCTCCTGT |
| | AAGTGAGGCAGAGCCTGGCAGTACCCTCTATGCCACCTCTCACTAGTACAGG |
| | TTAGCACTCAGGGTGGCCCACTGGTGTGTGTCTCAGCTGCTGGTGTGCGTGC |
| | TGGTGCAGGTAC |
| 2021 | TGGGCTGAGGGTTGTGGCTGGATCTCTTTGCATTGCCACATCCACAACAGAA |
| | TTTTGAGAAGTCCGAGAATTCTAAATTGGAGCCTGACCTTCTTCATAATAGT |
| | ATATTTGTCAAGGTAGGAGGATAAAACATTTTATTGAACAGTTTGCTAAGCT |
| | GATTTAAAATTTTCCAGCATTTAGCTATATGGTATATGGACCTCCACATGTA |
| | TGATTTCATTTATATTAAATGTCCAGAATAGACAAATCTATAATGACAATAA |
| | AGAGATTAGTAGTTGCCAGAGGCTGGGAGGAGGGGAGAAACAATGAGTGATT |
| | GCGGACGGGTGTGGGGTTTCTTTCTGGGGCGATAACAGTGTCCTGGAATTCA |
| | ATAGTGATAATGGATGCACACTGTGAATATACTAAAAGCCACTCACACTTTA |
| | AAAGTGTGGGTTTTATGGTAATTTGAATGATATATCAAGCTATCACCAAAAA |
| | TACACAATGGGAGTTCAGAAATGCCACCCCAAACTATGATGATTTGACATGC |
| | TCATTACTTTGAACTGATGTCACTTGGGGAAAAACAGATGCAGGCAGAGACT |
| | TTCTCTGAGATCTGCTTATCTGCCTAAGACAGATCAAGGGATCCTCCAAAAG |
| | GAACTCAATTGTCATGAATCCCCTCCCCTGGAACCTTATCAACCAGGGACAA |
| | TGAACTTAGATCAGAGAGGGGGAGACTGGAGGTTGACATCATGCCTAGACAG |
| | CCACCTCTTCTTCTGAGGGCTGCTCCAAGAGAACCTTTATTACTTGAGAGGC |
| | TTCTCATTTGCATAACAAGAAACCTTTGTTCACCATACACTTCCTCCCCTCA |
| | TATTCTCATAACTGGTGTCACCACCACCCACGCAGAAGTCCAAAGCCTCTAT |
| | TCCCTTCTGTACCTCAGGGTGCTATATAAGCTTCAATCATCTGACCCTTCTT |
| | TGAATCTCATATTTTGTGGGCTTGCATGGGTATGTACATAATTAAAAATGGA |
| | TTTCCTCTTGTT |
| 2022 | ATTTACACACATGCCACAGACAGAAACATTTTAATAGACCTTTGCTTATGGA |
| | AAAGTAAAGCAAAAATGTAATTCTAGAAGGGAGAAATTTTAGTCAATTAGAA |
| | AATAAGATGGTCAGGCATTGTAGCTCTCATGTGTAATCCCAGTGCTTTGGAA |
| | GGTTGAGGCGAGAGGATTGCTTGAGACCAGGAGTTTGCGACCAGCCTAGACA |
| | ACATAGCTGGTCATATAAAAAAACTTCAAAAAAATTAGCTAGCTGTAGAGCT |
| | TTCTGCCTATATTTCCAGCTACTCAAGGATGAGGCAAAAGAATCCCTTAAGC |
| | CCAGGAGGTTGAGGTTGCAGTGAACTGTAATTGCACCACCACACTCTAGCCT |
| | GGGTAACAGAGCAAGGTCCCATCTCCTAAAAAAAAAAGAAAGGAAAATAAAA |
| | AGAAAATAAACTATTCTCCATAATAATGTAGACAGCAATCCTCACTGTGAAC |
| | CAGAAGGAACCTCGGCAAATTTTTTAGACATCAATGGGATTTCACTATCAGC |
| | TGAGAGTGTTCCCTTTTTAGCATGGCAAGCTGTTTCCTGAAGCAATAGAGAG |
| | AAGCAAGACCAAGGAAAAATCTAGAAAGAGCCTCTCTGTAGAAAAGCAGAGC |
| | AATGATCTCTAATCACAATGCTATCAAATATTCCAGGCTAAATTTTCCTTTA |
| | TAGCATTAAAATTTTCCTCACATCCACAAGATTCCAATAGTTTTCTTAATGC |
| | CATAGCCTGGTGTCTATTCTGCCTTGTGGATTCCCATAATGCAAAATGCCAT |
| | TAAAAAAGGAACAGACCATGAGAAGTGGGCCTCCGAAGCACATGAAGCTTGG |
| | TATCATCAGAAAGATAAGGGGCAACAGTCAGGAATAATTGTTGGGACATTTA |
| | ATAAGTCCCTGGAAATTCCTAGAAACATAATTTTTTTTTGAGTCTAAGATGC |
| | TATCATTTTAAGGTGCACCATTATTTTATTTGCTACAATGTAGAAAACAATA |
| | ACACTGCCAATT |
| 2023 | TGATTAGGTAAAATATCAGAGACACAAATCAGGTTAAATTGATTTTTTATTG |
| | TAATTACATTTAAAATTTTAGAATTCATCAGTAGGTATGAACAAACATATAC |
| | ATACATATATATAATTTATATTATAAGTTTATTATTTATACTATACATTATA |
| | AAAATAACTGAGAGATAAACTTTCGTTTATCCTTAATGCTAAAATAATTCAT |
| | TTACCTTGGAGAGATCAGAACTCTGTCCATTTCCCCTACATAAAAACTAGAG |
| | AGTACTATTGCTTTCTCTTTCTCGGGCTTACTCTGGTCTCATAGAATATGCA |
| | TTTTCATTTTTTTTCAACAGAATATCCGTGGATAGCTAAAATTTCTGCTTCC |
| | TTTGTCAACATTTGTATTTCCCCAGTGGACATTTCTGCAAAATTTATTTTCA |
| | TTTCTTTGTTACCAGAGAAACTCTGTTGGTCAAGTTCAATAGCATCCTCAGC |
| | ATAATTTCAGAAGGAAATTACAGGGAGCAATTGAAGTCCATCACTTTCTTGG |
| | AGGGGAAATATTAACACCCTCACCTCTTGCTCCCAATATTAGGTGGTAGGCA |
| | GGAGTGAGTTACTCATTTTCTGAAGGAGCAGTAACTCTTTGGACCCCTCGAG |
| | TCACTTGGTAAATAAACTCTAGCACTGCCCCGAAGAGTGCCTCAGAGATTTC |
| | AAGGAATAAATGCTTTAAAGGTAGGAAAATGCTAAGAAACACCATCATATAA |
| | GTGAGTTATTTCCAATTTTATTTTAAATACAGCCATATATTATTACATACAG |
| | CCACACATTATTAAATAATGTATTAATACATTATTATTAAATACAGCCATAT |
| | ATATGTATATATGTGTGTGTGTATATATATACATATATATGTAAGTATGTAG |
| | CTGCTATACCCTCCTGAAGCAATGAATGTAGCTGCTATACCCTCCAGAAGCA |
| | ATGATACCCTCCAGAGGTGATAACAGATACAAGTAACAACCACACTCTCTGG |
| | TTTTGACAACCA |
| 2024 | CAGAGAGCTTCCAAGGCATTATCCCATCCAAAGGGTAAAGAGGCTGGGATAT |
| | TTATCGACTAGCTCCCATTCTTCACTGGCTGTAACTTGTCCACGTCTCACAG |
| | CTGTAACTCCCTTGTATTCCCTACCTATCTGGTGTGAGGACCAAGCTTGTGT |
| | CTGTGGATAGAGAAAGCCCTAAAGCAGAAAGTCTAGGTGCTTGCACAAAAAG |
| | ATCATCTGCACAGAATGATGATCAAGAGATGTGAGTGGGGCACCACAACATT |
| | TACCTCAGGAATCTCTGTTCAGGACTCAGCTTTGGTCTCAAACCTTGGGAAG |
| | CTTATACACTGAGGCAGTGTTAGGATCTCTTTTCTCTGCCTTCCTGTGCTTT |
| | TAAGTGTATTTCACTGTTTTTGATCCCTTGTCTGCCCCTTATATTTGACTAT |
| | CAGGCTCTTGAAGGTCTATTACACTTACTCATTGTTTTTACCCCCTGTTCCT |
| | ATCTCAGTGCCCAACACAGAGCTGACAGTTAATATATGTTGGTTGGATGCAT |
| | GTGTGGGTATCTTATCTTTTTATCCTTTAAAAGACCTCACACGTAGATGAAA |
| | ATTTTAAAATCATTAATTCAATCATCAATTCAATTCAATCATCTTTTTATCC |
| | TTTAAAAGACCTCACACATTGATGAAAATTTTAAAATCATTAATTCAATTGA |
| | AGAGGCCTTGTGATTGACATGAGTATAAATTGGACCATTATTAACTTCAAAC |
| | TAATTCTACTATGCCAGAAACCATGCCTGAAGTATTAAAACATCACGTTAAA |
| | AAACAAAAGACAAAAAAAAAACTTATCTAAAAAATTACATTAAATAAAATAG |
| | ACCAAAGGTAAATCTTACTCAAGTTTTCAGGAAAAAAAAATTGTTTTCTATA |
| | CTCTTTTCTCACCTATTCTTCCTTGTCACAGAGAAGCAATTATTATATTAGA |
| | CTTTCCTTTTTCAATGTGTAGATGACATCATATGATTTAAATTTTTTATGTA |
| | TTTCTCTTGCAA |
| 2025 | ATCAGCAGCAGAGGCTGCAGAACAGCGGATATTAGTGAAAAGCAAATGTTGC |
| | TGTCTGATCGTTCCTGTGGAAGTTTTGTCTCAGAGGAGTACCCGGCCGTGTG |
| | AGGTGTCAGTCTGCCCCTACTCGGGGGTGCCTCCCAGTTAGGCTACTCAGGG |
| | GTCAGGGACCCACTTGAGGAGGCAGTCTGTCTGTTCTCAGATCTCAAGCTGT |
| | GTGCTGGGAGAACCACTACTCTCTTCAAAGCTGTCAGACAGGGACATTTAAG |
| | TCTGCAGAGGTTTCTGCTGCCTTTTGTTGGGCTATGCCCTGCCCCCAGAGGT |
| | GGAGTCTACAGAGACAGGCAGGCCTTGAGCTGCAGTGGGCTCCACCCAGTTC |
| | GAGCTTCCTGGCTGCTTTGTTTACCTACAATGGTGGGCTCCCCTCCCCCAGC |
| | CTTGCTGCTGCCTTGCAGTTTGATCTCAGACTGCTGTGCTAGCAATGAGCGA |
| | GGCTCCATGGGCGTAGGACCCTCCGAGCCAGGTGGGATACAATCTTCTAGTT |
| | TGCTGTTTGCTAGGACCATTGGAAAAGCACAGTATTAGGGTGGGAGTGACCC |
| | GATTTTCCAGGTGCTGTCTGTCACCCCTTTCCTTGGCTAGGAAAGGGAATTC |
| | CCTGACCCCTTGCGCTTCCTGGGTGAGGTGATGCCTTGCCCTGCTTCGGCTC |
| | ATGCTCAGTGCACTGCACCCACTGTCTTGCACCCACTGTCCGACAATCCCCA |
| | GTGTGATGAACCCGGTACCTCAGTTGGAAATGCAGAAATCATTCATCTTCTG |
| | AGTCACTCACGCTGGGAGCTGTAGACTGGAGCTGTTCCTATTCGGCCATCTA |
| | CATGTTCTTTCTTCCCTCATCATCACTTCTTTACTTCTTTTATTTCACTTCT |
| | GGCTTTCTGTCCTCCCACGCTGAGGAAGACTGATTTGGTGGACATGTATTTA |
| | TTCTGCTGAGTACCAGTTGATGTGGAAGTAGTTGTTTTATAGTCAACATGTT |
| | TTTATGACTAAT |
| 2026 | GAGTGATGTCTAATCACAATCTGTGATAGGTATTTGCTTTAAGGTGCATCTA |
| | ATAACATGACAGTGATTTTCATCTCATATAACCTTCATTAACTCTGGTTCCC |
| | TGCTAAGATAAAGCCTTCCCTATAAGCCAACTGAGAATACTGTAGTCAGAAT |
| | TTACAGGTACTTCCCATTGTGGTTGTTCACCTTATTTGTGCCAGTTTTTCTT |
| | CTTCTTTATTCATACCTTTTGCCATGTGAATTTGCATTTCTTCTGGGTTGGA |
| | GTCAAGTATATATTTATCCTTTTTACCTTTGACTCTGAGGCTGGCCAAAGGA |
| | ATAAGGTGGATGTGACAAGGTACAATTTCTGAGCCTAGCCCTTAGAGGCCTT |
| | CCATGTTTCCACTTGTTCTCTTGCACTTGCGACGTTGCTGTCAAAAGAACAT |
| | GCAATGGCTAGCTAGCAGCCTGTGCACCTGCAGTGAGAACCAGAGCCACCCA |
| | GTTGCTGCAGCCTGAGACCAAGCTGCTCAGCTAAGCATAGCTTAGATCACCA |
| | TTGAGTTCTGAGGTGGTTTGTCATACAGCAATGGCAATCAGATATATCCACA |
| | CAAATATAATTTTAGTTTATATTTTTGTTACTGCAGTTCTCATCTTATTCTG |
| | AGGATACGTGACAAAATAATTCTTTCAAAAATATTGATGCTGTGCCAGATTA |
| | CTATTTTGAATGAATTATTAGACAAATACTTCATATGTATCTTATTATGTGG |
| | GTTTACACATTATTTATCTTATTGATTTAACTTCAAAACTAAACTTTAGTTT |
| | AGCTCTTGGGCCCTATCTGGGAAAGGGTCATCTTTTAATCACCATTAAATCA |
| | CTGAAGTCATCAGTTTATTCAAAGTACTCTGCACAAAATTAGCATTCTTTAG |
| | TGGTTGTGAAATAAATAGACTTTAAACTTATCATTAATATTCCCAATGGTAC |
| | TATGGGGGAGGCAAAATTTTCTATCTTCTTAGTGGTTTTTTTTTTTTTGGCT |
| | AGGGCTAAGGAT |
| 2027 | ACGCACCTGAGAAATGTGTTAAGGATTAAGATGCTAGTGCTAGATGTTTGAT |
| | TTTCTGAATCGAACCACTATTGGTGAGATCCAGAAGCTCAAAGACATGATAT |
| | ACCCACCTTCAAATAATGTTTATGTAGGTAATCTATTCTCAGGATTTATAGA |
| | CACTGCTGTTAAGACCTATTGTCATTGGGGTAAAAAAAAATCCTTATTATAT |
| | TATACAAATTATTATATACTATTATATTATAGAAATTATATTTCTATTAAAT |
| | AGCTTGTGTAGAAAGTAACCATATATAGTTAGAAAAACACTGATCTCAAGAA |
| | CAGGATTTTAGATTTGACTCTGACAATTTCTGTTCGGTCTTGTATAAATGTA |
| | TCAATTTAGATTTAGGGCTTTATTTTCTAATCCATAAAATGTGTAGCATACT |
| | TCTGCTAGCTATACATTTACTGAAGTTATTATTTTAAACTATTTTTATTTTC |
| | ATTTTTTTGTTTTGAGTTATAATCATAATTAATGGATTCAAGTGACAGAGAA |
| | AAGAAAGTAATTAGTCATCTTTTTTCAGAATACAGTCTTTGTTCTGAAGGTA |
| | TTTCGTATGAATCAAGTTTCAAATCTTCAGATAAATTTTCACCTTGCCAATG |
| | TGCTTTCTGCTCTAAATCATTCCTGAATTTTGCTATGATTTTTCTTTCTTAT |
| | AAAATCTTGACACTAAATTGTCAGGAGATATACATATATGTATATATGTAAA |
| | ATATATATATCATATATAAATATATATAAATTTTGAGTTAAAGTACTATTAC |
| | AGTATTCAATTCTACCAGTAATTCTAATAGTATGAAAATAAAGTCACCAGTT |
| | GAAGTAAGACCTACTGACACCTTCTATTATATTTCGATAATTCTATTTGAAA |
| | CTAATTATATAGTAGGACATTTTCATTGTTTTCAGTATTAACTGGCACTCAT |
| | GTAGATATTGCAGGCCAAATTTTACCTCTACCTTTTGGAATTTTCTGGGGTA |
| | GACTTGAGAATT |
| 2028 | TACATGTGTAAACAGTTTTAGCGTAGATTTCCTCGCACTTTTAAATTTTGGA |
| | TTCTTAATTTCCCTGTCCCCCCTGCCCCCCCCCCAAAAAAAACCTGCTAACG |
| | TTTAAACGAACACAGTTTGGGAAATCTGCGTTAAGTCCTTCGTGGGAGTGGG |
| | GTTGCTCAGCTCACAGTAGGCCACGAACCTGAATTTTCTCTTGTCTGCTGCC |
| | CCCTTTTGATAGATGGAGGGAAGAGCAGGCTTCCAGTGCAATGGACAGAAGA |
| | GGGAGCCTGCAAGTTGGTAACAGAGTCTATTAGGGAAAGAGAGAGTCACTTG |
| | AATCCTCAGAGCTGCTCCTGTCAACTGCTTTGTGCAGTTTTTGTGACTTATT |
| | AGCTGCTTGTTTGCACTCTATCTACGCCTGCCCAGGTGTGTTTGGGCCCTAG |
| | AGCGAAGGGAGCACAGGCGTTCATTTAGAAACTTATCCCTCCGTCCAAATAT |
| | TGGATGCTTACCATGTGCCTGGTGCAATGCAGGGTGATACAAAGAGGAAGAT |
| | AAGTGAGGCATTCTTATCGAAGGACCAGACACTCTTCCAGCCTGACTATATT |
| | CATTACACTCGTGCCTGACCTTTCTTTGACTCTAAGATTCTTCCTTTCTAAA |
| | TGTGAATCTTAAAGACTGAAGTCTTTGATCTAAGACTGCTTTCTTATCACAT |
| | CACATCCAACAACCAACTTTTCACAGCTTCCCAGATCCCAAATTCTGTTTAG |
| | CAAGGACACTTGGATTTTTTTGTTTTTTGTTATAAATGACCTCTTCAGGTTC |
| | ATATTTTCACTATGTCCAGAATTCTTATTTTATTCTGTTTTGTGCTGACATT |
| | GGAGGCAGAGTCTGTGTCACAGAATACACCACTAGGGGTTACCCTGGACATG |
| | GAAGGGTATTCACTCGGGGAAGAAATTTTAATGGAATTTTTAATATCTAGAG |
| | CTGTCATTATCCTGTGATGGTTCACAAGAAATGGAACACTTAAAAATTTCTA |
| | CAGAAAAAAAGG |
| 2029 | GCCACAAATTTGTTTTCTGTATCTGTAGATTTGCATTTTTTTCCGAACATCT |
| | CATATGAATAGAATCACAAAATTTGTGTATTTTGTGCCAAACTTCTTTCACT |
| | TAGCATACTGATTTCAAAATTGATCCAACTTATAGCATATATCAGTACTTTA |
| | TTCCTTTTTAGGGCAAAGAAATCTTCCATTACACGGATACCCCACATTTTAT |
| | TTCTCTACCCATCGCTTGCTGGGCATGAGTTGTTTGTGACAAATATTCATAT |
| | ACATATTCTTGTGTGGACATATGTTTTCGCTTCTCTTGGGTATATATCTAGG |
| | AGTAGGATTGCTGGGTCATATGGTAAGTCTCTATTTAATGGTTTAGACTCAG |
| | TACTTTGTTTTCTGCCTTTCCACAGCTCAGTTTCATAAAGAGGCAGGAGCCT |
| | TTTGTTCAGGGCTCCTTGGCAGTAAGGTAATTTCTTCTTCTGCATTGTATCC |
| | AGCTGACCCTTGCTCAGTGCTGTTCTTTGGGGGAAAGATGGAATGCTGGGAA |
| | GCCAGCACCTCTTATTCCTTCTAGCTAACACTTTTACAGTGACGGATATAAT |
| | AGATATCTTCAACTAGTATTGTTGAATTATCTCCCTGATGCTGTCCAATTTT |
| | GCTTCATATATTTTGGGGCTCTGTTATTAGGTATGCATATATAGTCATTATT |
| | GTTATATCTTTGTGGTGGTGTGGCCTTTTTATTATTTTAGCACTTTTATATC |
| | TTTACCTCTAATAACGTTTTTAAAAATTGAACGTTGATTTTGTCTGATGTTA |
| | GTACAACCACTTCAGCTTCTTTGTAGTTGCTGTTTGCATGACATATCTTTCT |
| | CCATTCTTTTACTTTCAATCTATTTGTATCTCTGGGTCTAAAATGTGTAGAT |
| | AGCACATAGTTGAATCTTTTAAAAAATACATTTTACAATCTCTGATTTTTAT |
| | TGGAATGTTTAATCCATCCACATTTAATGTTACGATTGATGGAGCTGGACTT |
| | ATTTCTGCCATA |
| 2030 | AACACAGAGCTAAAACCAAGTAAGAGGCGATTCTCCAAAAGCACTTCCTCAG |
| | CAAACAGCATATCTATTGTGTGTGGGTTCTTTAATTGGCTGAGAACTGAATT |
| | TCACCTTTGGCATTAAAGAGAAGTGTTTATTTTTACTGTCTTCACTGTTTTA |
| | ATGTTTAAACAAAATCTAAATACTGAGGTGAACTCTATCATAAAACAAGTGA |
| | AACGGCAACATAGGTTGATCCAGAAAGAAGCAAATTCCAGCATGGCGGGCAC |
| | TACATGTTTCAGCTCATCAGTTATCTGAATCTTATGGCTCTAAAGATGGATG |
| | GATGAGAATACATAGGCAGAAGCTTCCTGGTGAGGCTGGTATGATTCTGTTG |
| | TCCTATCTTCAACACTATCCTTCTACCTTCAGGGTTGCTGTTGTAGGTTTTA |
| | TTTCTTTGGCTTCTGTTGCCAGTAATGGAAAAGGACCACATGGAAGACTGTA |
| | TTTATGTACATCATGTCCAAACAGAATATCCTATAATAGTGAATCTTGGAAG |
| | AAAGCTTGAGAGATGTGGCCCAGCGCGGTGGCTCACACCTGTAATCCCAGCA |
| | CTTTGGGAGACTGAGGTGGGCTGATCACGAGGTCAGGAGTTCGAGACCAGTG |
| | TGACCAACATGGTGAAACCCCATCTCTACTAAAAAGACAAAAATTAGCCGGG |
| | CCTGGTGGTGTTGCACCCGTAATCCCAGCTACCCAGGAGGCTGAGGCAGGAG |
| | AATTGCTTGAACCCAGGAGGCAGAGGTTGCAGTGAGCCAAGATCGTACCACT |
| | GCACTCCAGCCCTCCAGCCTGGACAACAGAGCAAGACTCTGTCTCAAAAGAA |
| | AAAAAAAATACCAGTTTGAGAGATGTATGTGAGGACTGATTACCGAAAGCGA |
| | AAGGGTTTAGTACATCTCATGAGAACAGAGCAGTCACAAGTGATATAAACCA |
| | AACTCCCTTGGAAATTTGTAATCTATCAACTTCTTTATTTAAAGAGAATAGG |
| | AGGTTTACTGTG |
| 2031 | ACTCCCACTCCTACTAATTACAGCTTGTGTGTCCTTCAGTCATTCACTTCCC |
| | TTCACATGACCAGCCCAGCAGAAATGAACTACCAGGAACATGAGCTCAGAGC |
| | GATGGGCTGGCCACCTGCCAAGCACCTCTGAATGGAAAGAGCAGAATTTTGC |
| | ATTGCCTGCCATGCCACGTGGAGCAGGCCCTGGGTGGCTCTTTAGGGGATGG |
| | GTGTGGACTCCCACAACAAAACCAAGGGCCATATTCAAAGTTAAAAGCTCTG |
| | CCATAGATGGTATTTGTTGAGGCTGTGTGTGGTAGCTCATGCATGTATGCCC |
| | AACACTTTAGGAGGCTGAGGTGGGAAGATCACTTGAGGCTGGGAGTTCAAGT |
| | CTAGCCTAGGCAAGATAGTGAGATCCCTTCTCTAAAAAAGATAAAATATTAA |
| | CTGGGCATCATGGACGTGCCTGTAGCCCCAGCTACTGGGGAGGCTGAGGCAG |
| | GAGGATGGCTTGAGTCCAGGAGTTTGAGACTGCAGTGAGCTGTGATTGCACC |
| | ATTGCTCCCTAGCCCGGGTGACAGAACAAGACTTTTATTTCTTTAAAAAAAA |
| | AAAAAAAAAAGAAGGTGTTTACTGCAGTTGCTTTATTAAAAAAAAAGTAAAT |
| | GAATGTTCTGACTGTTCTACTTTTGAAAATAAGTGGCAAGGAATTAGAACTG |
| | TATCTTTCAGCAACAAAATGTACACTGTGGTTCCATGTCACAGCCAGGAATG |
| | GAGTCAGATGTCTCAGACCAGAATCACAGCTCTGCCACCTCCTGTGACATGG |
| | ACTTGCTAAGCTACCTTGACTCTCTGGAGCTCACTATGCCCATCAATAACAA |
| | GAAATAAATAAATCCGTCCTGTAAGGTTGTCAGGAGAAACAAATGAGGCACT |
| | ATATGTGGAAGTTCCTGGAATAGTGACCAGCACAGAGGACGTCTCAAAGAAA |
| | GATTTGCTGAACCCCAAAAGACAGGAGGACTGGAGGAACAACAAAGAGACAG |
| | GAAAGCTAGCAT |
| 2032 | AATTCATAGCCCAGCCAAGGAACTTAGAAGAGTAGAGGGAAGTCATTTTTCA |
| | CTCCCCTACAAGAACATTCTGCTGTAAAGAGGAGCTAGAAATAATTTTTGTT |
| | TTAAATTCAACCAAACATAGGGATAATTCTGAAATTTGGAACCAAAAGAATT |
| | ATAAGTACACTACTGGTGAATTTGTGCTTATCTGAAATCTACACATGTAGCT |
| | GTCTTTATGTATCTCTGTATATCGATGTTTTTCTATATATATAATCAGTGAA |
| | GTAAGATATCTAGTCATTCATTTACTCACCAAGTGATTGCAGTGGGGTGACA |
| | GGGACAGTGGGGGGTGTGGTGGCGGGTTGCCAGAGCATGAGGAGTATGCAAT |
| | AGAATCTAAGAAATCATACCTACCTGGCCAGGCACAGTTGCTCATGCCTGTA |
| | ATCCCAGCACTTTGGGAGGCAGAGGCAGGCGGATCACTTGAGGTCAGGAGTT |
| | CCAGACCAGCCTGGCCAACATGGTGAAATCCCATCTCTACTAAAAATACAAA |
| | AAATACAAAAAATTAGCTGGGTGTGGTGGCACATGCCTGTAATCCTGGCTAC |
| | TCTGGAGGCTGAGGCAGGAGAATGGCTTGAACCTGGGAGGCAGAGGCTGCAG |
| | TGAGCTGAAATTGTACTACTGCACTCCAGCCTGGGTGACAGAGTGAGACTCC |
| | ATCTCAAAAAAAAAAAAAAAAAAAAAAAATCAGACCTGCCTTCCATGAGCTC |
| | ATGGTATACTTGAATCTCCATAGGCTAGTTATTCAGGAGGGTATGTAATGTA |
| | ACTCAACAATGCACAATTACTTAAATTCGCTCAGGAGAATTACCTCATTTTG |
| | CCCAACTTGTTACTGTGAAAAAAAAAAAAGAAAGAAAATTTCAGGACCTTCC |
| | AAATTTATTATGCCAAAGGGAAAAGTCAAGCCCTGGAAACCAAGTCATGTAA |
| | CACGGCTGTTTTTCTTCTCTGGTGCATGACTGTTGCTTCCTGATCTTTTTGT |
| | TGATGTTATACA |
| 2033 | CATATAAATTAAATATTTATGTTATATTGAAGGAATACTTTTAGACTTGTTT |
| | AAACACAAATCTTTAAAAATTACATATCACTCTTGCATGTACATAAAAAATG |
| | AAAATATAGGCAATTAAATTAAGAGAGGTCTACAGTGTCTTTACATCAAGTC |
| | TGACTCTACTGAGTCCCTTTTTGACTCAGAGTCATTAATATATTGTTTTTTT |
| | CCAGTAATAATGTAGTGATGCAGCCTGTCTTCAAAGACTGCTCTACTATTGA |
| | CTCAGATTTTCTCCCAAGCCATTGATACTAGTTTTGAAGCTGATGCTTTTTA |
| | AATCTTGCTGTCAGACTTACGGGAAGGTTTTCATACAACAGGGCTCATATTC |
| | TTTCCTCAAATTATCCTTACATGTAAATGTTCAGAATGTCGAGATGATACAT |
| | AGGCCAGTTATGCCACTGTGAATATCTACCAAGGTCACATGTGTAATGAACA |
| | AAGACAGCTATTTCTGCTGCTGGCTGGCAGTGATTTGCAAGATTTTGTTGAC |
| | TGTAGGACATATCCTACTTCAATGATGTTAAAATGTGAACAAATATGCACTT |
| | CAGACTTTGTAAAATGTAGCACAGCACTTACAGAGCACACTAGGCTTCTGGC |
| | ACTCGCATAAAATGAAGACTTGGAGTTTTAGCTGAGTACTAAAGGAGGACCA |
| | TCCTCCCACCGAAGGATGAAGAATTTAAGGATATGTAAGTTGAGCTGTACTT |
| | ATGTTCATCTGTGATTTTTACAAGTCACTTATTGCTACATGTATCCTTTAAA |
| | TATGCGTTGTCCTTCCTCCTAAAATGGTTTCACCATAATAAGTGAAATGTCA |
| | GCTTGTCACATTAAATTATAAATTATAAATTACCATCACCTTAGTCCTCTAC |
| | ATATCCTTCAACTTCATTATGACACTGTCCTTCAGAGATAAGGAACAGAAAG |
| | GCTTTAATGAAAACTTCAGCTAATGTAATAATTAGGGAAGGATGAGCTAATT |
| | AAGAAACATACA |
| 2034 | CAAAGTCTCCCTAGAGGGCAAAATTGTCCCCATTGAAGACCACTGGGTTAGA |
| | TAGAAACTTACATCTCACACATGGAGAGTCCAGGCTGGCATGGTCGCTCTGC |
| | TGTGCACTGGGAGCCCAGGTTCCTCCTCGCTTTGCAAATTGTACAAGCTGCC |
| | CTCATCACCTGGATGCCTACATCTCACTTAAGAGTCTCAGTTCTAGGAGGGC |
| | ACAGACAATGGTGTACTGGTAAACAGACTCTGTTAAAAAAAAAAAAAAAAAA |
| | AACCAACACAATCAGGAACATTTTTTAAAAGCCCAGATTTGTAGTGTTTGCA |
| | GATTCTTATGTTTTAAATACTCCTGCCATGGCTGATGTGAAACTACCAACAG |
| | TTTAACAACTGGCTTACTAAATTTCTGAATATTTACCATTTGTCCCTTGTAA |
| | GACAGTATTAGTGGGCTGCAGTATATCAACAGAGAAAGGGAAGGAAAAGATA |
| | CAACCTTTTGTTGAAGGACAAAATGACATTTCACTTTTCTTCAGCCCCACTG |
| | GCCAAAACTTAGTCCCATGTTCACCTTAGCTGCAGGGGAGGCTGAAATGCAG |
| | TGTTTATTCTAAACAACCATGTATCCAGCCACAATACCAGGGGAATTTATCA |
| | CCAAGAGAAAGAGAGAGAGAATATCTAGTGCTTGAAAATTATCAGTCTCTGC |
| | CACAATTTTATTTAAAAAATAACCAGAAAAATGAGAGTGAATTTTATCTGAG |
| | AGGATCTTAGAAATCTCAGCATCGAGAAGGTAATAAATAAAGAGAGATAAGT |
| | CACAGACTTCCTGCGACAGTCAAGAATTCCCCATGCAGATGACACCCCAGGA |
| | GATGCCGGGTGATTGTTCTTACAATTTCTTCAGTTGAAGGTAAATGTGGCAC |
| | TAGCCATTTATTCTTTTAGCTCACGTTGTTTGAAGTGCATCGCCTATGTACT |
| | TCACCCTTTGGACTCACTAGAAAACAAAGAGAATTTTGGAATTAGAAGAGGC |
| | TTAATAATGTTA |
| 2035 | AAATATAAATAAAACATTTCTTTTGGAAATTTTATAATTCAAGCTAATTTAA |
| | AATTATGTAAACCTCTATCTTTCATGTAATCTTCTTCCTTCTTTTAAAACAA |
| | CATTTTTTTGGTGGTCATCTGTTCGGGAGAAAATGAAATTTTCTGTGGATAA |
| | GCAGATATTCTTCACGGAGAAAGCTAACATTCTGCATTCCTCTATTTTAAAA |
| | GTGGAAAACATAGTCCTGTTATTTGTATTTAGATGTATTTCTCACCAAAGAG |
| | TGCCAGGCTGGATTACAGAAGATCTATATTCTGATCTTGTCCTTTTTCTTTG |
| | CAAGCCTGAGGAATTGTCCAGACACAGAATTCCCTAGATCCCCAGATTTCTC |
| | ACCTATAATATGAAGGGTTGAAAGAGAGGTCTCAATCGGCTTTGAATTTTCT |
| | GTTCTATACTTCTGCACCACCACTGTAGCACTGACAATTGCATGAAAATATT |
| | AAGCTCTATTATGTTTTCAGTACTATCCTTAGCTTCTTTAAAAAATTAGTCT |
| | AGCTGTGTTTGTAAATAAATGATGTCACTGGAAAAATGGTTTCATACCATTG |
| | TTGTCAATAGTTGAATGTGGCTTGCCCTCAGGAACAATGCATTCTTCAATAA |
| | TATGGAGGATGGAAGGTGTATAAGGACTCAGATAGCTATTATTCTCATTTGC |
| | CCATGATCCTTTCATATCCCCGCCTCTGGTTTAGCATTCTCTTTCTTCCAGG |
| | GGAATTTCTCCCCCATTCCATGCATTCTAGTAGAATTTTTTATCACAGTAGA |
| | TTGTCCTGCCCTGCCACAGAAATGGGCATTTGACACAGTGGCCACAAAGATT |
| | GGTCTAAGCAGTAGGCCTGTGACCCAAGGTAGGCCAATTAGAGTTTTCTGTA |
| | GAATTTTTTAGATTCAAAGTGTATGTGTGTGGGGGGGATGACTCTTCTTGAA |
| | TTTTATATTAGGATGCATGCCAGAAATTGTTGAAAGGTCTTTAATGTACCAT |
| | GTACAGGAAGCT |
| 2036 | CACCTATAAGAGGAAATATACTTATGTCTAGGTGGACTCCAATGTGTCTGTT |
| | TACTGATACTTATTTATTCATTATTTTCAAGTAAAATGTAGAAGTGAATAAC |
| | TTAAGAGAATAACTATTTTTATGAGAGAAAAATACCCACTTTCTTTTTTATT |
| | ACTTTGTTCCTCTAGAGGTTCATGAATAATATATTGAACATGTGAGGAGTGA |
| | GGCCTGTCTAGCTCTTTTCCTAACATCTTCCACTCCTGTGGCCTCTTATTAG |
| | GTACCTTTCTCAGTGAAGATATACAATAAGAATTTTGCATGCTTATTGGGAA |
| | TTTATCTGTGAAAAATCACTCAAATGTCATTAAGTCTTTTCTGATAAACCTT |
| | AATCATCCAACAACCAGAGTTTTTCTTAAAATAGCTGTTGCTCTAGAAGAAT |
| | ACCATAGAATGAAGTTGCTTCCTAGCATGGCAGTCAAGGATCCTGGTTCCAA |
| | GTATGAGCTCTGAAGAAGATAGACTATGTTCACCGCTTACTATAGCTGAGTG |
| | CCCTTGGACAATTCATTTAAACTGCCCCTAATTTTCTTCCATCATCTGTAAA |
| | ATGAATGTAATAATAGCTCTTAATGAGTATTAAATTAGATAATAAGGGCACT |
| | GGCATTTATTAAGAACTTAATAAATGTTAGCTTTTGTTATTTCACATTTTTC |
| | CTTGATCACTCCTACCAGGAATAAAATTCTGGGAGGGTATAAGTAGGTAGTG |
| | AAGTGCTAACTGGTCTGGTTAATTGTTAGAGTTCTGTTAAAAAAAAGTTATT |
| | TGAAAAAAGTATTTTGGAGCTAGGATCTAATTTATTAATATATCTGGATTTT |
| | CTTTTTCAATTTTGGTGTCCATTATTCACATAAGTAATTGTGGTTTTGCTAT |
| | ATTTTTTCCTCCTGAAAAATTATGGCTATACAACTAACTTTATTGTATACTG |
| | AATTTTGGAATTTTTTAGGATTTGATGTTCTTACTGGGGAGAGGATTTTGAA |
| | TTATTTAACCAC |
| 2037 | AACAAGAGGAAAGCATACAAATTTATTTAATACATGTTTTATGTGGCACAGG |
| | AGCCCTCATAAAGTAATAAAAAATCCCCAAACACAGTTAGAGCTGAACATTT |
| | ATATACTAATCTGGACAAAACATTTATATACTGCGTGGACAAAGAGCAGTAA |
| | ATTGTGAAAATGGAACAAGGCAAGGGGGCTTAGACTACAGTAGTTAATCATC |
| | AAGAAGTGACAAAAAAAAATAAGGGTTAGTTAATAAGATTTGTTTAAGCAGA |
| | TTTCTCCCAGCTTTAGCTCTCTGTCTCTGGTGATCAGAATGCACTCCTTCCT |
| | TCAGACTCAGTGAGCACATATTCCACACGGAAGATTTCTTCCCTAGCTTTTA |
| | GGAAATCCAGAGAACCCTTTTTGTATCTGTTGTTTTTTTTTTTTTTTAAATG |
| | TCTTGTCTTTAACTCAAAACAATTTATGTGCCAGGATGACATATCTTTGGAT |
| | AATGTGTTCTGAACTCCTTCAGTACATACGTATATAAATTAAAGCAAATATT |
| | TTTTATGATAAGCTGGCATAATAGTTTCATAATTTAATCACTGATTTAAAAA |
| | TTTAATTAAAATTATTTTTTAATATTTTGTGTAATAATTTTTGAGGAGTATC |
| | TTTTGTGCTTAATGAGTGGCAGATGACACCCATGTTCTTAGCAGCATCATTC |
| | ACAATAGCTAAAAGATAGGAACAACTGCGTATTGATGGATGAATGGATAAGC |
| | AAAATGAGGTATATACATATAAGGGAATATTCTTCATCCTTAAAAAGGAAGG |
| | AAATTCTGACATATGCTACAACAAGGTTGAACCTCTAAGGACATTATGCTAA |
| | ATGAAATAAACCAGTCTCAAAAAGACAAATACTATGTGATTCCAGATACATA |
| | AGGCACCTAGAGACAAACTGATAGAGACAGAAAGTAGAATGAGTGATTACCA |
| | GGGGTTGTGAGAGGAAAAAAGAGAGGGTTGTTTGATACAGAGTTTCAGTTTT |
| | GCAAGATAAAAG |
| 2038 | AACAGGAGAAAAGCGTACAAGTTTATTAAATAGAAGTTTTGCAGCCGGGCGC |
| | GCTGGCTCACGCTTGTAATCCTGGCACTTTGGGAGGCCGAGGCGGGCAGATC |
| | ACGAGGTCAGGAGATCGAGACCACGGTGAAACCCCGTCTCTACTAAAAATAC |
| | AACAAATTAGCCAGGCGTGGTAGCGAGGCAGGAGAATGGTGTGAACCCGGGA |
| | GGCGGAGCTTGCCTCTGCACTCCAGATCATGCCACTGCACTCCAGCCTGGGT |
| | GACAGACCAAGACTCCGTCTCAAAAAAAAAAAAAAAAAAAAAAAAAAAAAAG |
| | AAGTTTTGCATGACATGGGAACCCTCATAAAAAAAGTGAAGTCCCAAAAAAG |
| | TGGCAAAATCTAAATGCTTTTATATTATGTTGACGAAAGAGGGGCAATTGTG |
| | GAAAAGTAACTAAATTATGAGGGTTAGGCTAACAGAAGATAAAAATTATTTT |
| | AACAAGTTCTGTTTGTATAAAATTTTCTCAATTTCAGCTACCCATCCTTGAT |
| | GATTAGAATGTTGCATTCCTTCTGGTATACAAGGAACATCTTCCATATGGGG |
| | GTTTTATCTTCTGCTTTCAGAAAAAAAAAAATAACTCTGTGTGTGGTAGGAT |
| | GAAGGTGTCAGAACATTCTTCTTGCACCTGCTGGTTGCTATCTTTTTAAACT |
| | GCATTTGTTTCAAAACAATCCTTATGACAAAGGGGTGTATTTTGGGGTGGCA |
| | TATTCTGTCACCCGTCAATATCAAAGTGGTTTTTGAGTTTGTGCTCATCTTC |
| | TTTCCTTATTCTGTTCCTTGTAAGGTAAGACTAAATATAATGGAATTTGCCG |
| | TCACATGTCTCTTATATGTAGTGAGTTTTAACAGGCATTCCAGGAAATGCCA |
| | TATGGTCTTTTAGCTTGGAAATTATTTTAGAAAACGATAAAATCTTTAGTGT |
| | GAAGTTATTTCCCAGATATGTATCGCTAAAATTATCATTACAGGTGCTCTAG |
| | GTAATATGTTTG |
| 2039 | TTAGTACTTCCATCCCTTTCCTGGCTGCTCTAACTTTACAGGTACTTGTAAG |
| | TGGCAATTAAGCACTTTTTCCTAATTCCAGAGTCTTGCCCCACTTCAGAGCA |
| | ACATAGAGTGGCCTAGACAGGCTGAGGTACTTTGCCGCTTCAGTCATCATTA |
| | ATCTATGGTATTTACTGATGAGAAGTAAAGTGGTAGAAGAAAAAAAAATTTT |
| | CTGTTATCCTGGGCACTTGGAAATGAATGTATTCTCACAATCTGTTCTCAAA |
| | ACAACTTACTGATTCTGGGGTTCTGGAAGCTCTGATGTGCAGGTGAGCCTTT |
| | TAAATTCCTCACTGTTGGAGCTCCTATCTAGGACTCACTGGCTGGATGAAAA |
| | CGGTTCTTTTTATTGCTTTCTGAATGTCTGCTAGACAGGCGTAAGCAACACC |
| | TTATATCTGCCTTCTGAAAAAGGTAAAAGAACTGGGACCCATCCACCATGCT |
| | GGACAGCTCGGCAGTGGCAGTGGCCTCCCCCAGACCCTGTTCCGAGTGCTCC |
| | ACCAACAAACTCACCAGCAGTCAGAGTCTAGCCTCTCCCCAAACTTCACCTT |
| | CATCACAATTCATTTTAAGCCCTTCCACAACCCAATCAACTCTAGATCTACT |
| | TAATGGATAATAATTTGATCTCATGCAAACTGCACTTTCCTCTTCTCAGAAT |
| | GATCCTTCTACCCCTTAATTAAACATTTGAGAGTGAAAGAAGAGAAAATTCG |
| | GGTTCAAAGATTGGTAAGTCTAAGAAACCTAAGGAAAAGGAGTTAGTAAACA |
| | TGTTAATCAAAGAGTGAGCACTTTTCGGAAGCGCAACATTCAGATACCTTTC |
| | TTGATTGGATTCCAGAAGACTATTTCTGGGAAGAGGAGATTTGCATTTTTCT |
| | AAAGTCTTCTACCCACAGCCTAACCACCCTAGGGCTTTGAAATATTTTTTTT |
| | CTGATGTGCAGTCATAATTGAATAAATAAAATGATTCCTGATCATTTCTTCT |
| | CTTCAGCTTTAT |
| 2040 | TATTCCTGTATTTCTATTGTACTTTTTTGCATTAAGAAACATTTTCCAATGT |
| | AACATTTTAATAGATTTTTCACTATTTGTTGAGTTATTTTTGAGTGGTTGTA |
| | CTTGAGCTTGCCATCTATGTCTTAACTTCAGATTTGTACTAACTTAATTCCA |
| | GGGAGATATAGAAGCATTATTCCTACATAGCTCTATATCAACCCCCTTTTCC |
| | TGTGGTATTATTGTTATACAAGGTACACCATATATGTTACAAATACAATTAT |
| | TTATAGTTATAATTATTACTTTAAATATATCATTTATGTCTATTAAAGAAGC |
| | TGAGAGCAGAGAGGAGATAAAGTATATATTTATAGAATTTGTTATATTAAGC |
| | TTCTTATTTGTCATTCTGATTCTCTTTGTTCTGGTGGACTTGAGTAAATATG |
| | TGATGTTATTTCATTATGCACACACAGCTTTGCTCCTTGTCATTTTATTTAT |
| | GCTGTCTTTCTCAAGTATATTGCATTTAAATACATTATAGGACCAACAATTC |
| | AAATATATTTATGTTGTGTTATACAATTGCTTTTTAAAATCAGTTAAGATAG |
| | ATGGGATATGCACTGATAGTATGGTTTTTAAAATTATACTTTAAGTTCTGGG |
| | TTACATATGCAGAACATGCTGTTTGGTTACATAGGTATACACGTGCCATGGT |
| | GGTTTGCTGCACCCATCAACCCACCACCTACATTAGGTATTTCTCCTAATGT |
| | TATCTGTCCTCTGGCCTCCAACCCCCCGACATGCCCCAGTGTGTGATGTTCC |
| | CCTCCCTGTGTCCATGTGTTCTCATTGTTCAACTCCCACTTATGAGTGAGAA |
| | CATGTGGTGTTTGGTTTTCTGATCTTGTGATAGTTTCCTGAGAATGATGGTT |
| | TCCAGCTTCATCCATGTCCCTGAAAAAGATATGAACTCATCCTAGACAATAA |
| | TTCAAACACACACACACACACACACACACACACACACACACACACGCAAATG |
| | GCACTAGTATCT |
| 2041 | TCCAGAAAACATAACAATTCAGAACATATATTTAATCCCTCCTCAATCCAGA |
| | TCCTTGTTGAAACAATGAAAGAGTACAATATACTGCCATGAAAAGTACTGAG |
| | AAAAGTCTACAGATAGTGACATGGAAGAAAAGAAAAAATATTAAATAGATCA |
| | AACTAGTTATATAATTTGTATCTCATTTCTGTAAAATAAATTTAACATTTAT |
| | AAGTGTATTAGTTTGTTCTCACATTGCTATAATAAAATACCTGAGACTGGGT |
| | AATTAAAAAAAAAAACAGATTTAATTGGCACACAGTTCTATAGGCTGTACAG |
| | AGAAAACAGTGGCTTCTGCTTCTGGGGAGGTTTCAGGAAACTTCCAATCATG |
| | ATGGAAGCCGAAGGGGAAGCAGACACATCTTACGTGGCCAGAGCAGGAGCAC |
| | AAGTGTGAAGGGAAGTGTCTGTTCATATTCTTCACTCACTTTTTAATGGGGT |
| | TGTTTGTTTTTTTCTTAGAAATTTAAGTTCCTTGTAGATTCTGGATATTAGG |
| | CCTTTGTCAGATGGATAGATTGCAAAAATGTTCTCCCATTCTGCAGGTTGCC |
| | TGTTCACTTTGATGATAGTTTCTTTTGCTGAGCAGAAGCTCTTTAGTTTAAT |
| | TTTGCAGGGACATGGATGAAGCTGGAAACCATTATCTTCAGTAGACTAACTG |
| | TTAACAGGAACAGAAAACCAAAAACAAACAAAAGCATGAAGAGGGAAGTGTC |
| | ACCCACATGAGAACTCACTATTGTGATGACAACACCAAGGGGAATGGTGTTA |
| | AACCATGAGAACCGGCCCCCATGATCCAATCACTTCCCACCAGGCCCCACCT |
| | CCAATACTGGATATTACAATTCAACAAGAGATTTGGGCAGGAATACAGATCC |
| | AAACCATATCAGTAAATATAATAAATATATATTAATAAATATGTAAATATAT |
| | GTATGCAAGTTAACAAATGAACCAGTTGGTATGTAAGTATGTATATAAAGGA |
| | CCATAGCAGTTA |
| 2042 | CTGAATACTAGAGGAGCAAGTACAACAAATGGAAAATGGGATCAAGTATGAG |
| | TGAGAGTTGCTAAGATGCCTGGTAGGGATGCAAAGGGGTAGAGAGCCTGGGG |
| | AGAGAGGGTGAGGGAGGGAAGCACTGGTTTCTCAAGCAAAAGCTAAAATTTT |
| | TCTATTAAGATTTAACCTGATGCTACACTTTGGTGGTGCAGCAAGGGTCTCA |
| | AATGGTATAAAACTCAGGTGATCATGCTTTATGTCTGTCTCTAGAAAAATGC |
| | TCCAAAAATGATAAGTAGTGATAATCCGCAGTCTCGTTGCATAAAATCAGCC |
| | CCAGGTGAATGACTAAGCTCCATTTCCCTACCCCACCCTTATTACAATAACC |
| | TCGACACCAACTCTAGTCCGTGGGAAGATAAACTAATCGGAGTCGCCCCTCA |
| | AATCTTACAGCTGCTCACTCCCCTGCAGGGCAACGCCCAGGGACCAAGTTAG |
| | CCCCTTAAGCCTAGGCAAAAGAATCCCGCCCATAATCGAGAAGCGACTCGAC |
| | ATGGAGGCGATGACGAGATCACGCGAGGAGGAAAGGAGGGAGGGCTTCTTCC |
| | AGGCCCAGGGCGGTCCTTACAAGACGGGAGGCAGCAGAGAACTCCCATAAAG |
| | GTATTGCGGCACTCCCCTCCCCCTGCCCAGAAGGGTGCGGCCTTCTCTCCAC |
| | CTCCTCCACCGCAGCTCCCTCAGGATTGCAGCTCGCGCCGGTTTTTGGAGAA |
| | CAAGCGCCTCCCACCCACAAACCAGCCGGACCGACCCCCGCTCCTCCCCCAC |
| | CCCCACGAGTGCCTGTAGCAGGTCGGGCTTGTCTCGCCCTTCAGGCGGTGGG |
| | AACCCGGGGCGGAGCCGCGGCCGCCGCCATCCAGAAGTCTCGGCCGGCAGCC |
| | CGCCCCCGCCTCCAGCGCGCGCTTCCTGCCACGTTGCGCAGGGGCGCGGGGC |
| | CAGACACTGCGGCGCTCGGCCTCGGGGAGGACCGTACCAACGCCCGCCTCCC |
| | CGCCACCCCCGCGCCCCGCGCAGTGGTTTCGCTCATGTGAGACTCGAGCCAG |
| | TAGCA |
| 2043 | GCCCTGCCAGGACGGGGCTGGCTACTGGCCTTATCTCACAGGTAAAACTGAC |
| | GCACGGAGGAACAATATAAATTGGGGACTAGAAAGGTGAAGAGCCAAAGTTA |
| | GAACTCAGGACCAACTTATTCTGATTTTGTTTTTCCAAACTGCTTCTCCTCT |
| | TGGGAAGTGTAAGGAAGCTGCAGCACCAGGATCAGTGAAACGCACCAGACGG |
| | CCGCGTCAGAGCAGCTCAGGTTCTGGGAGAGGGTAGCGCAGGGTGGCCACTG |
| | AGAACCGGGCAGGTCACGCATCCCCCCCTTCCCTCCCACCCCCTGCCAAGCT |
| | CTCCCTCCCAGGATCCTCTCTGGCTCCATCGTAAGCAAACCTTAGAGGTTCT |
| | GGCAAGGAGAGAGATGGCTCCAGGAAATGGGGGTGTGTCACCAGATAAGGAA |
| | TCTGCCTAACAGGAGGTGGGGGTTAGACCCAATATCAGGAGACTAGGAAGGA |
| | GGAGGCCTAAGGATGGGGCTTTTCTGTCACCAATCCTGTCCCTAGTGGCCCC |
| | ACTGTGGGGTGGAGGGGACAGATAAAAGTACCCAGAACCAGAGCCACATTAA |
| | CCGGCCCTGGGAATATAAGGTGGTCCCAGCTCGGGGACACAGGATCCCTGGA |
| | GGCAGCAAACATGCTGTCCTGAAGTGGACATAGGGGCCCGGGTTGGAGGAAG |
| | AAGACTAGCTGAGCTCTCGGACCCCTGGAAGATGCCATGACAGGGGGCTGGA |
| | AGAGCTAGCACAGACTAGAGAGGTAAGGGGGGTAGGGGAGCTGCCCAAATGA |
| | AAGGAGTGAGAGGTGACCCGAATCCACAGGAGAACGGGGTGTCCAGGCAAAG |
| | AAAGCAAGAGGATGGAGAGGTGGCTAAAGCCAGGGAGACGGGGTACTTTGGG |
| | GTTGTCCAGAAAAACGGTGATGATGCAGGCCTACAAGAAGGGGAGGCGGGAC |
| | GCAAGGGAGACATCCGTCGGAGAAGGCCATCCTAAGAAACGAGAGATGGCAC |
| | AGGCCCCAGAAGGAGAAGGAAAAGGGAACCCA |

[0299] In certain cases, expression of an exogenous DNA, e.g., transgene, inserted in a target polynucleotide at or near a target nucleotide sequence may depend on cell type and differentiation stage, as one or more components of a target polynucleotide get activated during differentiation while others get silenced, which may or may not be correlated with rearrangements of the chromatin architecture reorganization during differentiation. To overcome this, in certain embodiments, additional to the exemplary characteristics described above, a suitable target polynucleotide comprising a target nucleotide sequence demonstrates suitable expression of an inserted exogenous DNA, e.g., transgene, throughout differentiation and clonal expansion.

### IV. PHARMACEUTICAL COMPOSITIONS

[0300] Provided herein is a composition (e.g., pharmaceutical composition) comprising a guide nucleic acid, an engineered, non-naturally occurring system, or a eukaryotic cell, such as a guide nucleic acid, an engineered, non-naturally occurring system, or a eukaryotic cell, disclosed herein. In certain embodiments, the composition comprises an RNP comprising a guide nucleic acid, such as a guide nucleic acid disclosed herein, and a Cas protein (e.g., Cas nuclease). In certain embodiments, the composition comprises a single guide nucleic acid, such as a single guide nucleic acid disclosed herein. In certain embodiments, the composition comprises an RNP comprising the single guide nucleic acid, and a Cas protein (e.g., Cas nuclease). In certain embodiments, the composition comprises an RNP comprising the targeter nucleic acid, the modulator nucleic acid, and a Cas protein (e.g., Cas nuclease). In certain embodiments, the composition comprises a complex of a targeter nucleic acid and a modulator nucleic acid, such as a complex of a targeter nucleic acid and a modulator nucleic acid disclosed herein. In certain embodiments, the composition comprises an RNP comprising the targeter nucleic acid, the modulator nucleic acid, and a Cas protein (e.g., Cas nuclease).

[0301] In certain embodiments provided herein is a method of producing a composition, the method comprising incubating a single guide nucleic acid, such as a single guide nucleic acid disclosed herein, with a Cas protein, thereby producing a complex of the single guide nucleic acid and the Cas protein (e.g., an RNP). In certain embodiments, the method further comprises purifying the complex (e.g., the RNP).

[0302] In certain embodiments, provided is a method of producing a composition, the method comprising incubating a targeter nucleic acid and a modulator nucleic acid, such as a targeter nucleic acid and a modulator nucleic acid disclosed herein, under suitable conditions, thereby producing a composition (e.g., pharmaceutical composition) comprising a complex of the targeter nucleic acid and the modulator nucleic acid. In certain embodiments, the method further comprises incubating the targeter nucleic acid and the modulator nucleic acid with a Cas protein (e.g., the Cas nuclease that the targeter nucleic acid and the modulator nucleic acid are capable of activating or a related Cas protein), thereby producing a complex of the targeter nucleic acid, the modulator nucleic acid, and the Cas protein (e.g., an RNP). In certain embodiments, the method further comprises purifying the complex (e.g., the RNP).

[0303] For therapeutic use, a guide nucleic acid, an engineered, non-naturally occurring system, a CRISPR expression system, or a cell comprising such system or modified by such system disclosed herein is combined with a pharmaceutically acceptable carrier. The term “pharmaceutically acceptable” as used herein can refer to those compounds, materials, compositions, and/or dosage forms which are, within the scope of sound medical judgment, suitable for use in contact with the tissues of human beings and animals without excessive toxicity, irritation, allergic response, or other problem or complication, commensurate with a reasonable benefit-to-risk ratio.

[0304] The term “pharmaceutically acceptable carrier” as used herein includes buffers, carriers, and excipients suitable for use in contact with the tissues of human beings and animals without excessive toxicity, irritation, allergic response, or other problem or complication, commensurate with a reasonable benefit/risk ratio. Pharmaceutically acceptable carriers include any of the standard pharmaceutical carriers, such as a phosphate buffered saline solution, water, emulsions (e.g., such as an oil/water or water/oil emulsions), and various types of wetting agents. The compositions also can include stabilizers and preservatives. For examples of carriers, stabilizers, and adjuvants, see, e.g., Martin, Remington's Pharmaceutical Sciences, 15th Ed., Mack Publ. Co., Easton, PA (1975). Pharmaceutically acceptable carriers include buffers, solvents, dispersion media, coatings, isotonic and absorption delaying agents, or the like, that are compatible with pharmaceutical administration. The use of such media and agents for pharmaceutically active substances is known in the art.

[0305] In certain embodiments, a pharmaceutical composition disclosed herein comprises a salt, e.g., NaCl, MgCl2, KCl, MgSO4, etc.; a buffering agent, e.g., a Tris buffer, N-(2-Hydroxyethyl) piperazine-N′-(2-ethanesulfonic acid) (HEPES), 2-(N-Morpholino) ethanesulfonic acid (MES), MES sodium salt, 3-(N-Morpholino) propanesulfonic acid (MOPS), N-tris [Hydroxymethyl] methyl-3-aminopropanesulfonic acid (TAPS), etc.; a solubilizing agent; a detergent, e.g., a non-ionic detergent such as Tween-20, etc.; a nuclease inhibitor; or the like. For example, in certain embodiments, a subject composition comprises a subject DNA-targeting RNA, e.g., gRNA, and a buffer for stabilizing nucleic acids.

[0306] In certain embodiments, a pharmaceutical composition may contain formulation materials for modifying, maintaining, or preserving, for example, the pH, osmolarity, viscosity, clarity, color, isotonicity, odor, sterility, stability, rate of dissolution or release, adsorption, or penetration of the composition. In such embodiments, suitable formulation materials include, but are not limited to, amino acids (such as glycine, glutamine, asparagine, arginine or lysine); antimicrobials; antioxidants (such as ascorbic acid, sodium sulfite or sodium hydrogen-sulfite); buffers (such as borate, bicarbonate, Tris-HCl, citrates, phosphates or other organic acids); bulking agents (such as mannitol or glycine); chelating agents (such as ethylenediamine tetraacetic acid (EDTA)); complexing agents (such as caffeine, polyvinylpyrrolidone, beta-cyclodextrin or hydroxypropyl-beta-cyclodextrin); fillers; monosaccharides; disaccharides; and other carbohydrates (such as glucose, mannose or dextrins); proteins (such as serum albumin, gelatin or immunoglobulins); coloring, flavoring and diluting agents; emulsifying agents; hydrophilic polymers (such as polyvinylpyrrolidone); low molecular weight polypeptides; salt-forming counterions (such as sodium); preservatives (such as benzalkonium chloride, benzoic acid, salicylic acid, thimerosal, phenethyl alcohol, methylparaben, propylparaben, chlorhexidine, sorbic acid or hydrogen peroxide); solvents (such as glycerin, propylene glycol or polyethylene glycol); sugar alcohols (such as mannitol or sorbitol); suspending agents; surfactants or wetting agents (such as pluronics, PEG, sorbitan esters, polysorbates such as polysorbate 20, polysorbate, triton, tromethamine, lecithin, cholesterol, tyloxapal); stability enhancing agents (such as sucrose or sorbitol); tonicity enhancing agents (such as alkali metal halides, preferably sodium or potassium chloride, mannitol sorbitol); delivery vehicles; diluents; excipients and/or pharmaceutical adjuvants (see, Remington's Pharmaceutical Sciences, 18th ed. (Mack Publishing Company, 1990).

[0307] In certain embodiments, a pharmaceutical composition may contain nanoparticles, e.g., polymeric nanoparticles, liposomes, or micelles (See Anselmo et al. (2016) BIOENG. TRANSL. MED. 1:10-29). In certain embodiment, the pharmaceutical composition comprises an inorganic nanoparticle. Exemplary inorganic nanoparticles include, e.g., magnetic nanoparticles (e.g., Fe3MnO2) or silica. The outer surface of the nanoparticle can be conjugated with a positively charged polymer (e.g., polyethylenimine, polylysine, polyserine) which allows for attachment (e.g., conjugation or entrapment) of payload. In certain embodiment, the pharmaceutical composition comprises an organic nanoparticle (e.g., entrapment of the payload inside the nanoparticle). Exemplary organic nanoparticles include, e.g., SNALP liposomes that contain cationic lipids together with neutral helper lipids which are coated with polyethylene glycol (PEG) and protamine and nucleic acid complex coated with lipid coating. In certain embodiment, the pharmaceutical composition comprises a liposome, for example, a liposome disclosed in International (PCT) Application Publication No. WO 2015/148863.

[0308] In certain embodiments, the pharmaceutical composition comprises a targeting moiety to increase target cell binding or update of nanoparticles and liposomes. Exemplary targeting moieties include cell specific antigens, monoclonal antibodies, single chain antibodies, aptamers, polymers, sugars, and cell penetrating peptides. In certain embodiments, the pharmaceutical composition comprises a fusogenic or endosome-destabilizing peptide or polymer.

[0309] In certain embodiments, a pharmaceutical composition may contain a sustained-or controlled-delivery formulation. Techniques for formulating sustained-or controlled-delivery means, such as liposome carriers, bio-erodible microparticles or porous beads and depot injections, are also known to those skilled in the art. Sustained-release preparations may include, e.g., porous polymeric microparticles or semipermeable polymer matrices in the form of shaped articles, e.g., films, or microcapsules. Sustained release matrices may include polyesters, hydrogels, polylactides, copolymers of L-glutamic acid and gamma ethyl-L-glutamate, poly (2-hydroxyethyl-inethacrylate), ethylene vinyl acetate, or poly-D(−)-3-hydroxybutyric acid. Sustained release compositions may also include liposomes that can be prepared by any of several methods known in the art.

[0310] A pharmaceutical composition of the invention can be administered by a variety of methods known in the art. The route and/or mode of administration vary depending upon the desired results. Administration can be intravenous, intramuscular, intraperitoneal, or subcutaneous, or administered proximal to the site of the target. The pharmaceutically acceptable carrier should be suitable for intravenous, intramuscular, subcutaneous, parenteral, spinal, or epidermal administration (e.g., by injection or infusion). Depending on the route of administration, the active compound (e.g., the guide nucleic acid, engineered, non-naturally occurring system, or CRISPR expression system disclosed herein) may be coated in a material to protect the compound from the action of acids and other natural conditions that may inactivate the compound.

[0311] Formulation components suitable for parenteral administration include a sterile diluent such as water for injection, saline solution, fixed oils, polyethylene glycols, glycerin, propylene glycol or other synthetic solvents; antibacterial agents such as benzyl alcohol or methyl parabens; antioxidants such as ascorbic acid or sodium bisulfite; chelating agents such as EDTA; buffers such as acetates, citrates or phosphates; and agents for the adjustment of tonicity such as sodium chloride or dextrose.

[0312] For intravenous administration, suitable carriers include physiological saline, bacteriostatic water, Cremophor ELTM (BASF, Parsippany, NJ) or phosphate buffered saline (PBS). The carrier should be stable under the conditions of manufacture and storage and should be preserved against microorganisms. The carrier can be a solvent or dispersion medium containing, for example, water, ethanol, polyol (for example, glycerol, propylene glycol, and liquid polyetheylene glycol), and suitable mixtures thereof.

[0313] Pharmaceutical formulations preferably are sterile. Sterilization can be accomplished by any suitable method, e.g., filtration through sterile filtration membranes. Where the composition is lyophilized, filter sterilization can be conducted prior to or following lyophilization and reconstitution. In certain embodiments, the pharmaceutical composition is lyophilized, and then reconstituted in buffered saline, at the time of administration.

[0314] Pharmaceutical compositions of the invention can be prepared in accordance with methods well known and routinely practiced in the art. Sec, e.g., Remington: The Science and Practice of Pharmacy, Mack Publishing Co., 20th ed., 2000; and Sustained and Controlled Release Drug Delivery Systems, J. R. Robinson, ed., Marcel Dekker, Inc., New York, 1978. Pharmaceutical compositions are preferably manufactured under GMP conditions. Typically, a therapeutically effective dose or efficacious dose of the guide nucleic acid, engineered, non-naturally occurring system, or CRISPR expression system disclosed herein is employed in the pharmaceutical compositions of the invention. The compositions disclosed herein are formulated into pharmaceutically acceptable dosage forms by conventional methods known to those of skill in the art. Dosage regimens are adjusted to provide the optimum desired response (e.g., a therapeutic response). For example, a single bolus may be administered, several divided doses may be administered over time, or the dose may be proportionally reduced or increased as indicated by the exigencies of the therapeutic situation. It is especially advantageous to formulate parenteral compositions in dosage unit form for case of administration and uniformity of dosage. Dosage unit form as used herein refers to physically discrete units suited as unitary dosages for the subjects to be treated; each unit contains a predetermined quantity of active compound calculated to produce the desired therapeutic effect in association with the required pharmaceutical carrier.

[0315] Actual dosage levels of the active ingredients in the pharmaceutical compositions of the invention can be varied so as to obtain an amount of the active ingredient which is effective to achieve the desired therapeutic response for a particular patient, composition, and mode of administration, without being toxic to the patient. The selected dosage level depends upon a variety of pharmacokinetic factors including the activity of the particular compositions disclosed herein employed, or the ester, salt or amide thereof, the route of administration, the time of administration, the rate of excretion of the particular compound being employed, the duration of the treatment, other drugs, compounds and/or materials used in combination with the particular compositions employed, the age, sex, weight, condition, general health and prior medical history of the patient being treated, and like factors.

### V. THERAPEUTIC USES

[0316] Guide nucleic acids, engineered, non-naturally occurring systems, and the CRISPR expression systems, e.g., as disclosed herein, are useful for targeting, editing, and/or modifying the genomic DNA in a cell or organism. These guide nucleic acids and systems, as well as a cell comprising one of the systems or a cell whose genome has been modified by one of the systems, can be used to treat a disease or disorder in which modification of genetic or epigenetic information is desirable. Accordingly, provided herein is a method of treating a disease or disorder, the method comprising administering to a subject in need thereof a guide nucleic acid, a non-naturally occurring system, a CRISPR expression system, or a cell disclosed herein.

[0317] The term “subject” includes human and non-human animals. Non-human animals include all vertebrates, e.g., mammals and non-mammals, such as non-human primates, sheep, dog, cow, chickens, amphibians, and reptiles. Except when noted, the terms “patient” or “subject” are used herein interchangeably.

[0318] The terms “treatment”, “treating”, “treat”, “treated”, or the like, as used herein, can refer to obtaining a desired pharmacologic and/or physiologic effect. The effect may be therapeutic in terms of a partial or complete cure for a disease and/or adverse effect attributable to the disease or delaying the disease progression. “Treatment”, as used herein, covers any treatment of a disease in a mammal, e.g., in a human, and includes: (a) inhibiting the disease, i.e., arresting its development; and (b) relieving the disease, i.e., causing regression of the disease. It is understood that a disease or disorder may be identified by genetic methods and treated prior to manifestation of any medical symptom.

[0319] For minimization of toxicity and off-target effect, it can be important to control the concentration of the CRISPR-Cas system delivered. Optimal concentrations can be determined by testing different concentrations in a cellular, tissue, or non-human eukaryote animal model and using deep sequencing to analyze the extent of modification at potential off-target genomic loci. The concentration that gives the highest level of on-target modification while minimizing the level of off-target modification is generally selected for ex vivo or in vivo delivery.

[0320] It is understood that the guide nucleic acid, the engineered, non-naturally occurring system, and the CRISPR expression system disclosed herein can be used to treat any suitable disease or disorder that can be improved by the system in a cell.

[0321] For therapeutic purposes, certain methods disclosed herein is particularly suitable for editing or modifying a proliferating cell, such as a stem cell (e.g., a hematopoietic stem cell), a progenitor cell (e.g., a hematopoietic progenitor cell or a lymphoid progenitor cell), or a memory cell (e.g., a memory T cell). Given that such cell is delivered to a subject and will proliferate in vivo, tolerance to off-target events is low. Prior to delivery, however, it is possible to assess the on-target and off-target events, thereby selecting one or more colonies that have the desired edit or modification and lack any undesired edit or modification. Therefore, lower editing or modifying efficiency can be tolerated for such cell. The engineered, non-naturally occurring system of the present invention has the advantage of increasing or decreasing the efficiency of nucleic acid cleavage by, for example, adjusting the hybridization of dual guide nucleic acids. As a result, it can be used to minimize off-target events when creating genetically engineered proliferating cells.

[0322] In certain embodiments, the guide nucleic acid, the engineered, non-naturally occurring system, and/or the CRISPR expression system disclosed herein can be used to engineer an immune cell. Immune cells include but are not limited to lymphocytes (e.g., B lymphocytes or B cells, T lymphocytes or T cells, and natural killer cells), myeloid cells (e.g., monocytes, macrophages, eosinophils, mast cells, basophils, and granulocytes), and the stem and progenitor cells that can differentiate into these cell types (e.g., hematopoietic stem cells, hematopoietic progenitor cells, and lymphoid progenitor cells). The cells can include autologous cells derived from a subject to be treated, or alternatively allogenic cells derived from a donor.

[0323] In certain embodiments, the immune cell is a T cell, which can be, for example, a cultured T cell, a primary T cell, a T cell from a cultured T cell line (e.g., Jurkat, SupTi), or a T cell obtained from a mammal, for example, from a subject to be treated. If obtained from a mammal, the T cell can be obtained from numerous sources, including but not limited to blood, bone marrow, lymph node, the thymus, or other tissues or fluids. T cells can also be enriched or purified. The T cell can be any type of T cell and can be of any developmental stage, including but not limited to, CD4⁺/CD8⁺ double positive T cells, CD4⁺ helper T cells (e.g., Th1 and Th2 cells), CD8⁺ T cells (e.g., cytotoxic T cells), tumor infiltrating lymphocytes (TILs), memory T cells (e.g., central memory T cells and effector memory T cells), regulatory T cells, naive T cells, or the like.

[0324] In certain embodiments, an immune cell, e.g., a T cell, is engineered to express an exogenous gene. For example, in certain embodiments, an engineered CRISPR system disclosed herein may catalyze DNA cleavage at the gene locus, allowing for site-specific integration of the exogenous gene at the gene locus by HDR.

[0325] In certain embodiments, an immune cell, e.g., a T cell, is engineered to express a chimeric antigen receptor (CAR), i.e., the T cell comprises an exogenous nucleotide sequence encoding a CAR. As used herein, the term “chimeric antigen receptor” or “CAR” includes any artificial receptor including an antigen-specific binding moiety and one or more signaling chains derived from an immune receptor. CARs can comprise a single chain fragment variable (scFv) of an antibody specific for an antigen coupled via hinge and transmembrane regions to cytoplasmic domains of T cell signaling molecules, e.g., a T cell costimulatory domain (e.g., from CD28, CD137, OX40, ICOS, or CD27) in tandem with a T cell triggering domain (e.g., from CD3). A T cell expressing a chimeric antigen receptor is referred to as a CAR T cell. Exemplary CAR T cells include CD19 targeted CTL019 cells (see, Grupp et al. (2015) BLOOD, 126:4983), 19-282 cells (see, Park et al. (2015) J. CLIN. ONCOL., 33:7010), and KTE-C19 cells (see, Locke et al. (2015) BLOOD, 126:3991). Additional exemplary CAR T cells are described in U.S. Pat. Nos. 7,446,190, 8,399,645, 8,906,682, 9,181,527, 9,272,002, 9,266,960, 10,253,086, 10640569, and 10,808,035, and International (PCT) Publication Nos. WO 2013/142034, WO 2015/120180, WO 2015/188141, WO 2016/120220, and WO 2017/040945. Exemplary approaches to express CARs using CRISPR systems are described in Hale et al. (2017) MOL THER METHODS CLIN DEV., 4:192, MacLeod et al. (2017) MOL THER, 25:949, and Eyquem et al. (2017) NATURE, 543:113.

[0326] In certain embodiments, an immune cell, e.g., a T cell, binds an antigen, e.g., a cancer antigen, through an endogenous T cell receptor (TCR). In certain embodiments, an immune cell, e.g., a T cell, is engineered to express an exogenous TCR, e.g., an exogenous naturally occurring TCR or an exogenous engineered TCR. T cell receptors comprise two chains referred to as the α- and β-chains, that combine on the surface of a T cell to form a heterodimeric receptor that can recognize MHC-restricted antigens. Each of α- and β-chain comprises a constant region and a variable region. Each variable region of the α- and β-chains defines three loops, referred to as complementary determining regions (CDRs) known as CDR1, CDR2, and CDR3 that confer the T cell receptor with antigen binding activity and binding specificity.

[0327] In certain embodiments, a CAR or TCR binds a cancer antigen selected from B-cell maturation antigen (BCMA), mesothelin, prostate specific membrane antigen (PSMA), prostate stem cell antigen (PSCA), carbonic anhydrase IX (CAIX), carcinoembryonic antigen (CEA), CD5, CD7, CD10, CD19, CD20, CD22, CD30, CD33, CD34, CD38, CD41, CD44, CD49f, CD56, CD70, CD74, CD123, CD133, CD138, epithelial glycoprotein2 (EGP 2), epithelial glycoprotein-40 (EGP-40), epithelial cell adhesion molecule (EpCAM), receptor-type tyrosine-protein kinase (FLT3), folate-binding protein (FBP), fetal acetylcholine receptor (AChR), folate receptor-α and β (FRα and β), Ganglioside G2 (GD2), Ganglioside G3 (GD3), epidermal growth factor receptor 2 (HER-2/ERB2), epidermal growth factor receptor vIII (EGFRvIII), ERB3, ERB4, human telomerase reverse transcriptase (hTERT), Interleukin-13 receptor subunit alpha-2 (IL-13Ra2), K-light chain, kinase insert domain receptor (KDR), Lewis A (CA19.9), Lewis Y (LeY), LI cell adhesion molecule (LICAM), melanoma-associated antigen 1 (melanoma antigen family Al, MAGE-A1), Mucin 16 (MUC-16), Mucin 1 (MUC-1; e.g., a truncated MUC-1), KG2D ligands, cancer-testis antigen NY-ESO-1, oncofetal antigen (h5T4), tumor-associated glycoprotein 72 (TAG-72), vascular endothelial growth factor R2 (VEGF-R2), Wilms tumor protein (WT-1), type 1 tyrosine-protein kinase transmembrane receptor (ROR1), B7-H3 (CD276), B7-H6 (Nkp30), Chondroitin sulfate proteoglycan-4 (CSPG4), DNAX Accessory Molecule (DNAM-1), Ephrin type A Receptor 2 (EpHA2), Fibroblast Associated Protein (FAP), Gpl00/HLA-A2, Glypican 3 (GPC3), HA-IH, HERK-V, IL-1 IRa, Latent Membrane Protein 1 (LMP1), Neural cell-adhesion molecule (N-CAM/CD56), and Trail Receptor (TRAIL-R).

[0328] Genetic loci suitable for insertion of a CAR- or exogenous TCR-encoding sequence include but are not limited to safe harbor loci (e.g., the AAVS1 locus) TCR subunit loci (e.g., the TCRα constant (TRAC) locus, the TCRβ constant 1 (TRBC1) locus, the TCRβ constant 2 (TRBC2) locus, the CD3E locus, the CD3D locus, the CD3G locus, and the CD3Z locus). It is understood that insertion in the TRAC locus reduces tonic CAR signaling and enhances T cell potency (see, Eyquem et al. (2017) NATURE, 543:113). Furthermore, inactivation of the endogenous TCR subunit gene, e.g., TRAC, TRBC1, or TRBC2 gene may reduce a graft-versus-host disease (GVHD) response, thereby allowing use of allogeneic T cells as starting materials for preparation of CAR T cells. Accordingly, in certain embodiments, an immune cell, e.g., a T cell, is engineered to have reduced expression of an endogenous TCR or TCR subunit, e.g., TRAC, TRBC1, TRBC2, CD3E, CD3D, CD3G, and/or CD3Z. The cell may be engineered to have partially reduced or no expression of the endogenous TCR or TCR subunit. For example, in certain embodiments, the immune cell, e.g., a T cell, is engineered to have less than 80% (e.g., less than 70%, less than 60%, less than 50%, less than 40%, less than 30%, less than 20%, less than 10%, or less than 5%) of the expression of the endogenous TCR or TCR subunit relative to a corresponding unmodified or parental cell. In certain embodiments, the immune cell, e.g., a T cell, is engineered to have no detectable expression of the endogenous TCR or TCR subunit. Exemplary approaches to reduce expression of TCRs using CRISPR systems are described in U.S. Pat. No. 9,181,527, Liu et al. (2017) CELL RES, 27:154, Ren et al. (2017) CLIN CANCER RES, 23:2255, Cooper et al. (2018) LEUKEMIA, 32:1970, and Ren et al. (2017) ONCOTARGET, 8:17002.

[0329] It is understood that certain immune cells, such as T cells, also express major histocompatibility complex (MHC) or human leukocyte antigen (HLA) genes, and inactivation of these endogenous gene may reduce an immune response, thereby allowing use of allogeneic T cells as starting materials for preparation of CAR T cells. Accordingly, in certain embodiments, an immune cell, e.g., a T-cell, is engineered to have reduced expression of one or more endogenous class I or class II MHCs or HLAs (e.g., beta 2-microglobulin (B2M), class II major histocompatibility complex transactivator (CIITA)). The cell may be engineered to have partially reduced or no expression of an endogenous MHC or HLA. For example, in certain embodiments, the immune cell, e.g., a T-cell, is engineered to have less than less than 80% (e.g., less than 70%, less than 60%, less than 50%, less than 40%, less than 30%, less than 20%, less than 10%, or less than 5%) of the expression of endogenous MHC (e.g., B2M, CIITA) relative to a corresponding unmodified or parental cell. In certain embodiments, the immune cell, e.g., a T cell, is engineered to have no detectable expression of an endogenous MHC (e.g., B2M, CIITA). In certain cases, a cell may be engineered to have expression of, e.g., HLA-E and/or HLA-G, in order to avoid attack by natural killer (NK) cells. Exemplary approaches to reduce expression of MHCs using CRISPR systems are described in Liu et al. (2017) CELL RES, 27:154, Ren et al. (2017) CLIN CANCER RES, 23:2255, and Ren et al. (2017) ONCOTARGET, 8:17002.

[0330] Other genes that may be inactivated include but are not limited to CD3, CD52, and deoxycytidine kinase (DCK). For example, inactivation of DCK may render the immune cells (e.g., T cells) resistant to purine nucleotide analogue (PNA) compounds, which are often used to compromise the host immune system in order to reduce a GVHD response during an immune cell therapy. In certain embodiments, the immune cell, e.g., a T-cell, is engineered to have less than less than 80% (e.g., less than 70%, less than 60%, less than 50%, less than 40%, less than 30%, less than 20%, less than 10%, or less than 5%) of the expression of endogenous CD52 or DCK relative to a corresponding unmodified or parental cell.

[0331] It is understood that the activity of an immune cell (e.g., T cell) may be enhanced by inactivating or reducing the expression of an immune suppressor such as an immune checkpoint protein. Accordingly, in certain embodiments, an immune cell, e.g., a T cell, is engineered to have reduced expression of an immune checkpoint protein. Exemplary immune checkpoint proteins expressed by wild-type T cells include but are not limited to PDCD1 (PD-1), CTLA4, ADORA2A (A2AR), B7-H3, B7-H4, BTLA, KIR, LAG3, HAVCR2 (TIM3), TIGIT, VISTA, PTPN6 (SHP-1), and FAS. The cell may be modified to have partially reduced or no expression of the immune checkpoint protein. For example, in certain embodiments, the immune cell, e.g., a T cell, is engineered to have less than 80% (e.g., less than 70%, less than 60%, less than 50%, less than 40%, less than 30%, less than 20%, less than 10%, or less than 5%) of the expression of the immune checkpoint protein relative to a corresponding unmodified or parental cell. In certain embodiments, the immune cell, e.g., a T cell, is engineered to have no detectable expression of the immune checkpoint protein. Exemplary approaches to reduce expression of immune checkpoint proteins using CRISPR systems are described in International (PCT) Publication No. WO 2017/017184, Cooper et al. (2018) LEUKEMIA, 32:1970, Su et al. (2016) ONCOIMMUNOLOGY, 6: c1249558, and Zhang et al. (2017) FRONT MED, 11:554.

[0332] The immune cell can be engineered to have reduced expression of an endogenous gene, e.g., an endogenous genes described above, by gene editing or modification. For example, in certain embodiments, an engineered CRISPR system disclosed herein may result in DNA cleavage at a gene locus, thereby inactivating the targeted gene. In other embodiments, an engineered CRISPR system disclosed herein may be fused to an effector domain (e.g., a transcriptional repressor or histone methylase) to reduce the expression of the target gene.

[0333] The immune cell can also be engineered to express an exogenous protein (besides an antigen-binding protein described above) at the locus of a human ADORA2A, B2M, CD52, CIITA, CTLA4, DCK, FAS, HAVCR2, LAG3, PDCD1, PTPN6, TIGIT, TRAC, TRBC1, TRBC2, CARD11, CD247, IL7R, LCK, or PLCG1 gene.

[0334] In certain embodiments, an immune cell, e.g., a T cell, is modified to express a dominant-negative form of an immune checkpoint protein. In certain embodiments, the dominant-negative form of the checkpoint inhibitor can act as a decoy receptor to bind or otherwise sequester the natural ligand that would otherwise bind and activate the wild-type immune checkpoint protein. Examples of engineered immune cells, for example, T cells containing dominant-negative forms of an immune suppressor are described, for example, in International (PCT) Publication No. WO 2017/040945.

[0335] In certain embodiments, an immune cell, e.g., a T cell, is modified to express a gene (e.g., a transcription factor, a cytokine, or an enzyme) that regulates the survival, proliferation, activity, or differentiation (e.g., into a memory cell) of the immune cell. In certain embodiments, the immune cell is modified to express TET2, FOXO1, IL-12, IL-15, IL-18, IL-21, IL-7, GLUT1, GLUT3, HK1, HK2, GAPDH, LDHA, PDK1, PKM2, PFKFB3, PGK1, ENO1, GYS1, and/or ALDOA. In certain embodiments, the modification is an insertion of a nucleotide sequence encoding the protein operably linked to a regulatory element. In certain embodiments, the modification is a substitution of a single nucleotide polymorphism (SNP) site in the endogenous gene. In certain embodiments, an immune cell, e.g., a T cell, is modified to express a variant of a gene, for example, a variant that has greater activity than the respective wild-type gene. In certain embodiments, the immune cell is modified to express a variant of CARD11, CD247, IL7R, LCK, or PLCG1. For example, certain gain-of-function variants of IL7R were disclosed in Zenatti et al., (2011) NAT. GENET. 43 (10): 932-39. The variant can be expressed from the native locus of the respective wild-type gene by delivering an engineered system described herein for targeting the native locus in combination with a donor template that carries the variant or a portion thereof.

[0336] In certain embodiments, an immune cell, e.g., a T cell, is modified to express a protein (e.g., a cytokine or an enzyme) that regulates the microenvironment that the immune cell is designed to migrate to (e.g., a tumor microenvironment). In certain embodiments, the immune cell is modified to express CA9, CA12, a V-ATPase subunit, NHE1, and/or MCT-1.

### A. Gene Therapies

[0337] It is understood that the engineered, non-naturally occurring system and CRISPR expression system, e.g., as disclosed herein, can be used to treat a genetic disease or disorder, i.e., a disease or disorder associated with or otherwise mediated by an undesirable mutation in the genome of a subject.

[0338] Exemplary genetic diseases or disorders include age-related macular degeneration, adrenoleukodystrophy (ALD), Alagille syndrome, alpha-1-antitrypsin deficiency, argininemia, argininosuccinic aciduria, ataxia (e.g., Friedreich ataxia, spinocerebellar ataxias, ataxia telangiectasia, essential tremor, spastic paraplegia), autism, biliary atresia, biotinidase deficiency, carbamoyl phosphate synthetase I deficiency, carbohydrate deficient glycoprotein syndrome (CDGS), a central nervous system (CNS)-related disorder (e.g., Alzheimer's disease, amyotrophic lateral sclerosis (ALS), canavan disease (CD), ischemia, multiple sclerosis (MS), neuropathic pain, Parkinson's disease), Bloom's syndrome, cancer, Charcot-Marie-Tooth disease (e.g., peroncal muscular atrophy, hereditary motor sensory neuropathy), congenital hepatic porphyria, citrullinemia, Crigler-Najjar syndrome, cystic fibrosis (CF), Dentatorubro-Pallidoluysian Atrophy (DRPLA), diabetes insipidus, Fabry, familial hypercholesterolemia (LDL receptor defect), Fanconi's anemia, fragile X syndrome, a fatty acid oxidation disorder, galactosemia, glucose-6-phosphate dehydrogenase (G6PD), glycogen storage diseases (e.g., type I (glucose-6-phosphatase deficiency, Von Gierke II (alpha glucosidase deficiency, Pompe), III (debrancher enzyme deficiency, Cori), IV (brancher enzyme deficiency, Anderson), V (muscle glycogen phosphorylase deficiency, McArdle), VII (muscle phosphofructokinase deficiency, Tauri), VI (liver phosphorylase deficiency, Hers), IX (liver glycogen phosphorylase kinase deficiency)), hemophilia A (associated with defective factor VIII), hemophilia B (associated with defective factor IX), Huntington's disease, glutaric aciduria, hypophosphatemia, Krabbe, lactic acidosis, Lafora disease, Leber's Congenital Amaurosis, Lesch Nyhan syndrome, a lysosomal storage disease, metachromatic leukodystrophy disease (MLD), mucopolysaccharidosis (MPS) (e.g., Hunter syndrome, Hurler syndrome, Maroteaux-Lamy syndrome, Sanfilippo syndrome, Scheie syndrome, Morquio syndrome, other, MPSI, MPSII, MPSIII, MSIV, MPS 7), a muscular/skeletal disorder (e.g., muscular dystrophy, Duchenne muscular dystrophy), myotonic Dystrophy (DM), neoplasia, N-acetylglutamate synthase deficiency, ornithine transcarbamylase deficiency, phenylketonuria, primary open angle glaucoma, retinitis pigmentosa, schizophrenia, Severe Combined Immune Deficiency (SCID), Spinobulbar Muscular Atrophy (SBMA), sickle cell anemia, Usher syndrome, Tay-Sachs disease, thalassemia (e.g., B-Thalassemia), trinucleotide repeat disorders, tyrosinemia, Wilson's disease, Wiskott-Aldrich syndrome, X-linked chronic granulomatous disease (CGD), X-linked severe combined immune deficiency, and xeroderma pigmentosum.

[0339] Additional exemplary genetic diseases or disorders and associated information are available on the world wide web at kumc.edu/gec/support, genome.gov/10001200, and ncbi.nlm.nih.gov/books/NBK22183/. Additional exemplary genetic diseases or disorders, associated genetic mutations, and gene therapy approaches to treat genetic diseases or disorders are described in International (PCT) Publication Nos. WO 2013/126794, WO 2013/163628, WO 2015/048577, WO 2015/070083, WO 2015/089354, WO 2015/134812, WO 2015/138510, WO 2015/148670, WO 2015/148860, WO 2015/148863, WO 2015/153780, WO 2015/153789, and WO 2015/153791, U.S. Pat. Nos. 8,383,604, 8,859,597, 8,956,828, 9,255, 130, and 9,273,296, and U.S. Patent Application Publication Nos. 2009/0222937, 2009/0271881, 2010/0229252, 2010/0311124, 2011/0016540, 2011/0023139, 2011/0023144, 2011/0023145, 2011/0023146, 2011/0023153, 2011/0091441, 2012/0159653, and 2013/0145487.

### VI. KITS

[0340] It is understood that the guide nucleic acid, the engineered, non-naturally occurring system, the CRISPR expression system, and/or a library disclosed herein can be packaged in a kit suitable for use by a medical provider. Accordingly, in another aspect, the invention provides kits containing any one or more of the elements disclosed in the above systems, libraries, methods, and compositions. In certain embodiments, the kit comprises an engineered, non-naturally occurring system as disclosed herein and instructions for using the kit. The instructions may be specific to the applications and methods described herein. In certain embodiments, one or more of the elements of the system are provided in a solution. In certain embodiments, one or more of the elements of the system are provided in lyophilized form, and the kit further comprises a diluent. Elements may be provided individually or in combinations, and may be provided in any suitable container, such as a vial, a bottle, a tube, or immobilized on the surface of a solid base (e.g., chip or microarray). In certain embodiments, the kit comprises one or more of the nucleic acids and/or proteins described herein. In certain embodiments, the kit provides all elements of the systems of the invention.

[0341] In certain embodiments of a kit comprising the engineered, non-naturally occurring dual guide system, the targeter nucleic acid and the modulator nucleic acid are provided in separate containers. In other embodiments, the targeter nucleic acid and the modulator nucleic acid are pre-complexed, and the complex is provided in a single container.

[0342] In certain embodiments, the kit comprises a Cas protein or a nucleic acid comprising a regulatory element operably linked to a nucleic acid encoding a Cas protein provided in a separate container. In other embodiments, the kit comprises a Cas protein pre-complexed with the single guide nucleic acid or a combination of the targeter nucleic acid and the modulator nucleic acid, and the complex is provided in a single container.

[0343] In certain embodiments, the kit further comprises one or more donor templates provided in one or more separate containers. In certain embodiments, the kit comprises a plurality of donor templates as disclosed herein (e.g., in separate tubes or immobilized on the surface of a solid base such as a chip or a microarray), one or more guide nucleic acids disclosed herein, and optionally a Cas protein or a regulatory element operably linked to a nucleic acid encoding a Cas protein as disclosed herein. Such kits are useful for identifying a donor template that introduces optimal genetic modification in a multiplex assay. The CRISPR expression systems as disclosed herein are also suitable for use in a kit.

[0344] In certain embodiments, a kit further comprises one or more reagents and/or buffers for use in a process utilizing one or more of the elements described herein. Reagents may be provided in any suitable container and may be provided in a form that is usable in a particular assay, or in a form that requires addition of one or more other components before use (e.g., in concentrate or lyophilized form). A buffer may be a reaction or storage buffer, including but not limited to a sodium carbonate buffer, a sodium bicarbonate buffer, a borate buffer, a Tris buffer, a MOPS buffer, a HEPES buffer, and combinations thereof. In some embodiments, the buffer is alkaline. In certain embodiments, the buffer has a pH from about 7 to about 10. In certain embodiments, the kit further comprises a pharmaceutically acceptable carrier. In certain embodiments, the kit further comprises one or more devices or other materials for administration to a subject.

### VII. EMBODIMENTS

[0345] In embodiment 1 provided herein is a composition comprising a modified human cell comprising (a) a first genomic modification comprising a first portion of a first polynucleotide, wherein the first portion codes for a first chimeric antigen receptor (CAR) or portion thereof, inserted into a site with a TRAC gene, whereby the TRAC gene is partially or completely inactivated and the first CAR or portion thereof is expressed, and (b) a second genomic modification comprising a second polynucleotide coding for a fusion protein of B2M and HLA-E or HLA-G inserted into a B2M gene, whereby endogenous B2M is partially or completely inactivated and the fusion protein is expressed. In embodiment 2 provided herein is the composition of embodiment 1, wherein the TRAC gene is completely inactivated. In embodiment 3 provided herein is the composition of embodiment 1 or embodiment 2, wherein the endogenous B2M gene is completely inactivated. In embodiment 4 provided herein is the composition of any one of embodiments 1-3, further comprising (c) a third genomic modification in a CIITA gene, wherein the CIITA gene is partially or completely inactivated. In embodiment 5 provided herein is the composition of embodiment 4, wherein the CIITA gene is completely inactivated. In embodiment 6 provided herein is the composition of embodiment 4 or embodiment 5, wherein the third genomic modification comprises a substitution, an insertion, a deletion, a nonsense mutation, or a truncation. In embodiment 7 provided herein is the composition of any one of embodiments 1 through 6, wherein the CAR or portion thereof comprises a polypeptide that binds at least one of B7H3, BCMA, GPRC5D, CD8, CD8a, CD19, CD20, CD22, CD28, 4-1BB, or CD3zeta. In embodiment 8 provided herein is the composition of embodiment 7, wherein the CAR or portion thereof comprises a polypeptide at least 60, at least 70, at least 80, at least 90, at least 95, at least 99%, or 100% identical to any one of the amino acid sequences of SEQ ID NOs: 86-124. In embodiment 9 provided herein is the composition of embodiment 1 or embodiment 6, wherein the CAR or portion thereof comprises a polypeptide that binds at least one of B7H3, BCMxA, GPRC5D, CD8, CD8a, CD20, CD22, CD28, 4-1BB, or CD3zeta. In embodiment 10 provided herein is the composition of embodiment 9, wherein the CAR or portion thereof comprises a polypeptide at least 60, at least 70, at least 80, at least 90, at least 95, at least 99%, or 100% identical to any one of the amino acid sequences of SEQ ID NOS: 86-104 or 116-124. In embodiment 11 provided herein is the composition of any one of embodiments 1 through 10, further comprising a second portion of the first polynucleotide, wherein the second portion codes for a second CAR or portion thereof, different from the first CAR or portion thereof. In embodiment 12 provided herein is a composition comprising a modified human cell comprising (a) a first genomic modification comprising a first portion of a polynucleotide, wherein the first portion codes for a first chimeric antigen receptor (CAR) or portion thereof, inserted into a site with a TRAC gene, whereby the TRAC gene is partially or completely inactivated and the first CAR or portion thereof is expressed, and (b) a second genomic modification in a CIITA gene, wherein the CIITA gene is partially or completely inactivated. In embodiment 13 provided herein is the composition of embodiment 12, wherein the TRAC gene is completely inactivated. In embodiment 14 provided herein is the composition of embodiment 12 or embodiment 13, wherein the CIITA gene is completely inactivated. In embodiment 15 provided herein is the composition of any one of embodiments 12 through 14, further comprising (c) a third genomic modification comprising a polynucleotide coding for a fusion protein of B2M and HLA-E or HLA-G inserted into a B2M gene, whereby endogenous B2M is partially or completely inactivated and the fusion protein is expressed. In embodiment 16 provided herein is the composition of embodiment 15, wherein endogenous B2M is completely inactivated. In embodiment 17 provided herein is the composition of embodiment 12, wherein the second genomic modification comprises a substitution, an insertion, a deletion, a nonsense mutation, or a truncation. In embodiment 18 provided herein is the composition of any one of embodiments 12 through 17, wherein the CAR or portion thereof comprises a polypeptide that binds at least one of B7H3, BCMA, GPRC5D, CD8, CD8a, CD19, CD20, CD22, CD28, 4-1BB, or CD3zeta. In embodiment 19 provided herein is the composition of embodiment 18, wherein the CAR or portion thereof comprises a polypeptide at least 60, at least 70, at least 80, at least 90, at least 95, at least 99%, or 100% identical to any one of the amino acid sequences of SEQ ID NOs: 86-124. In embodiment 20 provided herein is the composition of any one of embodiments 12 through 17, wherein the CAR or portion thereof comprises a polypeptide that binds at least one of B7H3, BCMA, GPRC5D, CD8, CD8a, CD20, CD22, CD28, 4-1BB, or CD3zeta. In embodiment 21 provided herein is the composition of embodiment 20, wherein the CAR or portion thereof comprises a polypeptide at least 60, at least 70, at least 80, at least 90, at least 95, at least 99%, or 100% identical to any one of the amino acid sequences of SEQ ID NOs: 86-104 or 116-124. In embodiment 22 provided herein is the composition of any one of embodiments 12 through 21, further comprising a second portion of the polynucleotide, wherein the second potion codes for a second CAR or portion thereof, different from the first CAR or portion thereof. In embodiment 23 provided herein is a composition comprising a modified human cell comprising (a) a first genomic modification comprising a polynucleotide coding for a fusion protein of B2M and HLA-E or HLA-G inserted into a B2M gene, whereby endogenous B2M is partially or completely inactivated and the fusion protein is expressed; and (b) a second genomic modification in a CIITA gene, wherein the CIITA gene is partially or completely inactivated. In embodiment 24 provided herein is the composition of embodiment 23, wherein the endogenous B2M gene is completely inactivated. In embodiment 25 provided herein is the composition of embodiment 23 or embodiment 24, wherein the CIITA gene is completely inactivated. In embodiment 26 provided herein is the composition of embodiment 25, wherein the second genomic modification comprises a substitution, an insertion, a deletion, a nonsense mutation, or a truncation. In embodiment 27 provided herein is the composition of any one of embodiments 23 through 26, further comprising (c) a third genomic modification comprising a first portion of a polynucleotide, wherein the first portion codes for a first chimeric antigen receptor (CAR) or portion thereof, inserted into a site with a TRAC gene, whereby the TRAC gene is partially or completely inactivated and the first CAR or portion thereof is expressed. In embodiment 28 provided herein is the composition of embodiment 27, wherein the CAR or portion thereof comprises a polypeptide that binds at least one of B7H3, BCMA, GPRC5D, CD8, CD8a, CD19, CD20, CD22, CD28, 4-1BB, or CD3zeta. In embodiment 29 provided herein is the composition of embodiment 28, wherein the CAR or portion thereof comprises a polypeptide at least 60, at least 70, at least 80, at least 90, at least 95, at least 99%, or 100% identical to any one of the amino acid sequences of SEQ ID NOs: 86-124. In embodiment 30 provided herein is the composition of embodiment 27, wherein the CAR or portion thereof comprises a polypeptide that binds at least one of B7H3, BCMxA, GPRC5D, CD8, CD8a, CD20, CD22, CD28, 4-1BB, or CD3zeta. In embodiment 31 provided herein is the composition of embodiment 29, wherein the CAR or portion thereof comprises a polypeptide at least 60, at least 70, at least 80, at least 90, at least 95, at least 99%, or 100% identical to any one of the amino acid sequences of SEQ ID NOS: 86-104 or 116-124. In embodiment 32 provided herein is the composition of any one of embodiments 27 through 31, further comprising a second portion of the first polynucleotide, wherein the second portion codes for a second CAR or portion thereof, different from the first CAR or portion thereof. In embodiment 33 provided herein is the composition of any one of embodiments 1 through 32, wherein the cell comprises an immune cell or a stem cell. In embodiment 34 provided herein is the composition of embodiment 33, wherein the cell comprises an immune cell comprising a neutrophil, cosinophil, basophil, mast cell, monocyte, macrophage, dendritic cell, natural killer cell, or a lymphocyte. In embodiment 35 provided herein is the composition of embodiment 33, wherein the cell comprises a T cell. In embodiment 36 provided herein is the composition of embodiment 33, wherein the cell comprises a stem cell comprising a human pluripotent, multipotent stem cell, embryonic stem cell, induced pluripotent stem cell, hematopoictic stem cell, or a CD34+ cell. In embodiment 37 provided herein is the composition of embodiment 33, wherein the cell comprises a stem cell comprising an iPSC. In embodiment 38 provided herein is the composition of any one of embodiments 1 through 37, further comprising a nuclease system or one or more polynucleotides encoding for one or more parts of the system comprising (1) a nucleic acid-guided nuclease; and (2) a guide nucleic acid compatible with and capable of binding to and activating the nucleic acid-guided nuclease and comprising a spacer sequence complementary to a target nucleotide sequence in a polynucleotide of a human genome, wherein, contacting the target polynucleotide with the nuclease system results in a strand break in at least one strand of the target polynucleotide of the genome of the human cell at or near the target nucleotide sequence. In embodiment 39 provided herein is the composition of embodiment 38, wherein the nucleic acid-guided nuclease comprises an engineered, non-naturally occurring nuclease. In embodiment 40 provided herein is the composition of embodiment 38 or embodiment 39, wherein the nucleic acid-guided nuclease comprises a Class 1 or a Class 2 nuclease. In embodiment 41 provided herein is the composition of embodiment 40, wherein the nucleic acid-guided nuclease comprises a Type II or a Type V nuclease. In embodiment 42 provided herein is the composition of embodiment 41, wherein the nucleic acid-guided nuclease comprises a Type V-A, V-B, V-C, V-D, or V-E nuclease. In embodiment 43 provided herein is the composition of embodiment 42, wherein the nucleic acid-guided nuclease comprises a Type V-A nuclease. In embodiment 44 provided herein is the composition of embodiment 43, wherein the nucleic acid-guided nuclease comprises a MAD nuclease, an ART nuclease, or an ABW nuclease. In embodiment 45 provided herein is the composition of embodiment 44, wherein the nucleic acid-guided nuclease comprises an amino acid sequence at least 80%, at least 85%, at least 90%, at least 95%, at least 99%, or 100% identical to an amino acid sequence of a MAD, ART, or ABW nuclease. In embodiment 46 provided herein is the composition of embodiment 44, wherein the nucleic acid-guided nuclease comprises a MAD1, MAD2, MAD3, MAD4, MAD5, MAD6, MAD7, MAD8, MAD9, MAD10, MAD11, MAD12, MAD13, MAD14, MAD15, MAD16, MAD17, MAD18, MAD19, or MAD20 nuclease. In embodiment 47 provided herein is the composition of embodiment 44, wherein the nucleic acid-guided nuclease comprises an ART1, ART2, ART3, ART4, ART5, ART6, ART7, ART8, ART9, ART10, ART11, ART11*, ART12, ART13, ART14, ART15, ART16, ART17, ART18, ART19, ART20, ART21, ART22, ART23, ART24, ART25, ART26, ART27, ART28, ART29, ART30, ART31, ART32, ART33, ART34, or ART35 nuclease. In embodiment 48 provided herein is the composition of embodiment 44, wherein the nucleic acid-guided nuclease comprises an amino acid sequence at least 80%, at least 85%, at least 90%, at least 95%, at least 99%, or 100% identical, to the amino acid sequence of MAD2, MAD7, ART2, ART11, or ART11*. In embodiment 49 provided herein is the composition of embodiment 44, wherein the nucleic acid-guided nuclease comprises an amino acid sequence that is at least 80%, at least 85%, at least 90%, at least 95%, 99%, or 100% identical, to the amino acid sequence of SEQ ID NO: 37. In embodiment 50 provided herein is the composition of any one of embodiments 38 through 49, wherein the nucleic acid-guided nuclease further comprises at least one nuclear localization signal (NLS), at least one purification tag, and/or at least one cleavage site. In embodiment 51 provided herein is the composition of embodiment 50, wherein the nucleic acid-guided nuclease comprises at least 4 nuclear localization signals (NLS). In embodiment 52 provided herein is the composition of embodiment 51, wherein the nucleic acid-guided nuclease comprises one N-terminal and three C-terminal nuclease localization signals (NLS). In embodiment 53 provided herein is the composition of any one of embodiments 50 through 52, wherein the nuclear localization signals comprise any one of SEQ ID NOs: 40-56. In embodiment 54 provided herein is the composition of embodiment 32, wherein the NLS comprises SEQ ID NOs: 40, 51, and 56. In embodiment 55 provided herein is the composition of embodiment 38, wherein the guide nucleic acid comprises (i) a targeter nucleic acid comprising a targeter stem sequence and the spacer sequence, and (ii) a modulator nucleic acid comprising a modulator stem sequence complementary to the targeter stem sequence, and, optionally, a 5′ sequence. In embodiment 56 provided herein is the composition of embodiment 55, wherein the guide nucleic acid comprises a single polynucleotide. In embodiment 57 provided herein is the composition of embodiment 55 or embodiment 56, wherein the guide nucleic acid comprises an engineered, non-naturally occurring guide nucleic acid. In embodiment 58 provided herein is the composition of embodiment 55 or embodiment 57, wherein the guide nucleic acid comprises a dual guide nucleic acid, wherein the targeter nucleic acid and the modulator nucleic acid are separate polynucleotides. In embodiment 59 provided herein is the composition of embodiment 58, wherein the dual guide nucleic acid is capable of binding to and activating a nucleic acid-guided nuclease, that, in a naturally occurring system, is activated by a single crRNA in the absence of a tracrRNA. In embodiment 60 provided herein is the composition of any one of embodiments 38 through 59, wherein the target nucleotide sequence is within at least 10, 20, 30, 40, or 50 nucleotides of a protospacer adjacent motif (PAM) that is recognized by the nucleic acid-guided nuclease. In embodiment 61 provided herein is the composition of any one of embodiments 38 through 60, wherein the guide nucleic acid and the nucleic acid-guided nuclease form a nucleic acid-guided nuclease complex. In embodiment 62 provided herein is the composition of embodiment 61, wherein the guide nucleic acid further comprises a donor template recruiting sequence. In embodiment 63 provided herein is the composition of embodiment 38 through 62, wherein the guide nucleic acid comprises a heterologous spacer sequence. In embodiment 64 provided herein is the composition of any one of embodiments 38 through 63, wherein the spacer sequence is at least 80%, at least 85%, at least 90%, at least 95%, at least 99.5%, or 100% identical to any one of any one of SEQ ID NOs: 125-2019. In embodiment 65 provided herein is the composition of any one of embodiments 38 through 64, wherein some or all of the guide nucleic acid comprises RNA. In embodiment 66 provided herein is the composition of embodiment 65, wherein at least 50%, at least 70%, at least 90%, at least 95%, or 100% of the guide nucleic acid comprises RNA. In embodiment 67 provided herein is the composition of any one of embodiments 38 through 66, wherein the guide nucleic acid comprises one or more chemical modifications to one or more nucleotides and/or internucleotide linkages at or near the 5′ end, at or near the 3′ end, and/or both. In embodiment 68 provided herein is the composition of embodiment 67, wherein the chemical modification comprises a 2′-O-alkyl, a 2′-O-methyl, a phosphorothioate, a phosphonoacetate, a thiophosphonoacetate, a 2′-O-methyl-3′-phosphorothioate, a 2′-O-methyl-3′-phosphonoacetate, a 2′-O-methyl-3′-thiophosphonoacetate, a 2′-deoxy-3′-phosphonoacetate, a 2′-deoxy-3′-thiophosphonoacetate, or a combination thereof. In embodiment 69 provided herein is the composition of any one of embodiments 38 through 68, further comprising one or more donor templates. In embodiment 70 provided herein is the composition of embodiment 69, wherein the donor template comprises single-stranded DNA, linear single-stranded RNA, linear double-stranded DNA, linear double-stranded RNA, circular single-stranded DNA, circular single-stranded RNA, circular double-stranded DNA, or circular double-stranded RNA. In embodiment 71 provided herein is the composition of embodiment 69 or embodiment 70, wherein the donor template comprises two homology arms. In embodiment 72 provided herein is the composition of embodiment 71, wherein the homology arms comprise at least 50, 100, 150, 200, 250, 300, 350, 400, 450, 500, 600, 700, 800, or 900 and/or at most 100, 150, 200, 250, 300, 350, 400, 450, 500, 600, 700, 800, 900, or 1000 nucleotides, for example 50-1000 nucleotides, preferably 100-800 nucleotides, more preferably 250-750 nucleotides, even more preferably 400-600 nucleotides. In embodiment 73 provided herein is the composition of any one of embodiments embodiment 69 through 72, wherein the donor template comprises a mutation in a PAM sequence to partially or completely abolish binding of the RNP to the DNA. In embodiment 74 provided herein is the composition of any one of embodiments 69 through 73, wherein the donor template comprises one or more promoters. In embodiment 75 provided herein is the composition of embodiment 74, wherein the promoter shares at least 70%, at least 75%, at least 80%, at least 85%, at least 90%, at least 95%, at least 99.5%, or 100% sequence identity with any one of SEQ ID NOs: 78-85. In embodiment 76 provided herein is the composition of any one of embodiments 69 through 75, wherein the donor template comprises one or more chemical modifications to one or more nucleotides and/or internucleotide linkages at or near the 5′ end, at or near the 3′ end, or both. In embodiment 77 provided herein is the composition of embodiment 76, wherein the chemical modification comprises a 2′-O-alkyl, a 2′-O-methyl, a phosphorothioate, a phosphonoacetate, a thiophosphonoacetate, a 2′-O-methyl-3′-phosphorothioate, a 2′-O-methyl-3′-phosphonoacetate, a 2′-O-methyl-3′-thiophosphonoacetate, a 2′-deoxy-3′-phosphonoacetate, a 2′-deoxy-3′-thiophosphonoacetate, a suitable alternative, or a combination thereof. In embodiment 78 provided herein is the composition of any one of embodiments 69 through 77, wherein the at least portion of the donor template is inserted by an innate cell repair mechanism. In embodiment 79 provided herein is the composition of embodiment 78, wherein the innate cell repair mechanism comprises homology directed repair (HDR). In embodiment 80 provided herein is a composition comprising a plurality of cell populations comprising (a) a first cell population comprising a plurality of the modified human cells of any one of embodiments 1 through 11, and (b) a second cell population comprising a plurality of modified human cells wherein the second cell population does not comprise a modified human cell of the first population. In embodiment 81 provided herein is the composition of embodiment 80, wherein the first population of cells comprises at least 1, 2, 3, 4, 5, 6, 7, 8, 9, 10, 15, 20, 25, 30, 35, 40, 45, 50, 55, 60, 65, or 70% and/or not more than 2, 3, 4, 5, 6, 7, 8, 9, 10, 15, 20, 25, 30, 35, 40, 45, 50, 55, 60, 65, or 75% of all of the cells in the plurality of cell populations, for example 1-75% of all the cells in the plurality of cell populations, preferably 1-10%, more preferably 1-20%, even more preferably 1-30%, yet even more preferably 1-40%. In embodiment 82 provided herein is the composition of embodiment 80 or embodiment 81, wherein the second population of cells comprises at least 1, 2, 3, 4, 5, 6, 7, 8, 9, 10, 15, 20, 25, 30, 35, 40, 45, 50, 55, 60, 65, or 70% and/or no more than 2, 3, 4, 5, 6, 7, 8, 9, 10, 15, 20, 25, 30, 35, 40, 45, 50, 55, 60, 65, or 75% of all of the cells in the plurality of cell populations, for example 1-75% of all the cells in the plurality of cell populations, preferably 1-10%, more preferably 1-20%, even more preferably 1-30%, yet even more preferably 1-40%. In embodiment 83 provided herein is the composition of any one of embodiments 80 through 82, further comprising a third cell population wherein the third cell population does not contain a modified human cell of either the first or the second cell population. In embodiment 84 provided herein is the composition of embodiment 83, wherein the third population of cells comprises at least 1, 2, 3, 4, 5, 6, 7, 8, 9, 10, 15, 20, 25, 30, 35, 40, 45, 50, 55, 60, 65, or 70% and/or no more than 2, 3, 4, 5, 6, 7, 8, 9, 10, 15, 20, 25, 30, 35, 40, 45, 50, 55, 60, 65, or 75% of all of the cells in the plurality of cell populations, for example 1-75% of all the cells in the plurality of cell populations, preferably 1-10%, more preferably 1-20%, even more preferably 1-30%, yet even more preferably 1-40%. In embodiment 85 provided herein is the composition of any one of embodiments 80 through 84, further comprising a fourth cell population wherein the fourth cell population does not contain a modified human cell of either the first, second, or third cell population. In embodiment 86 provided herein is the composition of embodiment 85, wherein the fourth population of cells comprises at least 1, 2, 3, 4, 5, 6, 7, 8, 9, 10, 15, 20, 25, 30, 35, 40, 45, 50, 55, 60, 65, or 70% and/or no more than 2, 3, 4, 5, 6, 7, 8, 9, 10, 15, 20, 25, 30, 35, 40, 45, 50, 55, 60, 65, or 75% of all of the cells in the plurality of cell populations, for example 1-75% of all the cells in the plurality of cell populations, preferably 1-10%, more preferably 1-20%, even more preferably 1-30%, yet even more preferably 1-40%. In embodiment 87 provided herein is a composition comprising a plurality of cell populations comprising (a) a first cell population comprising a plurality of the modified human cells of any one of embodiments 4 through 11, and (b) a second cell population comprising a plurality of modified human cells wherein the second cell population does not comprise a modified human cell of any one of embodiments 4 through 11. In embodiment 88 provided herein is the composition of embodiment 87 further comprising a third cell population wherein the third cell population does not contain a modified human cell of embodiment 4 through 11 or a modified human cell of the second cell population. In embodiment 89 provided herein is the composition of any one of embodiments 80 through 88, further comprising a pharmaceutically acceptable excipient.

[0346] In embodiment 90 provided herein is a composition comprising a plurality of cell populations comprising (a) a first cell population comprising a plurality of cells wherein each cell comprises (i) a first genomic modification whereby a first gene that codes for a subunit of a TCR is partially or completely inactivated, (ii) a second genomic modification whereby a second gene that codes for a subunit of an HLA-1 protein is partially or completely inactivated, (iii) a third genomic modification whereby a third gene that codes for a subunit of an HLA-2 protein or that codes for a transcription factor for one or more subunits of an HLA-2 protein is partially or completely inactivated, and (b) a second cell population, different from the first, wherein the second cell population comprises a plurality of cells that do not comprise one or more of genomic modifications of (i) through (iii), wherein each cell of the second population comprises the same genomic modifications. In embodiment 91 provided herein is the composition of embodiment 90, wherein the first cell population comprises at least 1, 2, 3, 4, 5, 6, 7, 8, 9, 10, 15, 20, 25, 30, 35, 40, 45, 50, 55, 60, 65, or 70% and/or no more than 2, 3, 4, 5, 6, 7, 8, 9, 10, 15, 20, 25, 30, 35, 40, 45, 50, 55, 60, 65, or 75% of all of the cells in the plurality of cell populations, for example 1-75% of all the cells in the plurality of cell populations, preferably 1-10%, more preferably 1-20%, even more preferably 1-30%, yet even more preferably 1-40%. In embodiment 92 provided herein is the composition of embodiment 90 or embodiment 91, wherein the second cell population comprises at least 1, 2, 3, 4, 5, 6, 7, 8, 9, 10, 15, 20, 25, 30, 35, 40, 45, 50, 55, 60, 65, or 70% and/or no more than 2, 3, 4, 5, 6, 7, 8, 9, 10, 15, 20, 25, 30, 35, 40, 45, 50, 55, 60, 65, or 75% of all of the cells in the plurality of cell populations, for example 1-75% of all the cells in the plurality of cell populations, preferably 1-10%, more preferably 1-20%, even more preferably 1-30%, yet even more preferably 1-40%. In embodiment 93 provided herein is the composition of any one of embodiments 90 through 92, wherein the first cell population further comprises (iv) a fourth genomic modification comprising a first portion of a polynucleotide, wherein the first portion codes for a first chimeric antigen receptor (CAR) or portion thereof, inserted into the first gene coding for a subunit of the T cell receptor (TCR) or into a safe harbor site, whereby the first CAR or portion thereof is expressed. In embodiment 94 provided herein is the composition of embodiment 93, wherein the subunit of a TCR protein comprises an alpha subunit or a beta subunit or a TRAC, TRBC, CD3E, CD3D, CD3G, or CD3Z protein. In embodiment 95 provided herein is the composition of embodiment 94, wherein the subunit of a TCR protein is an alpha subunit. In embodiment 96 provided herein is the composition of embodiment 95, wherein the gene coding for the subunit of a TCR protein is a TRAC gene. In embodiment 97 provided herein is the composition of embodiment 90 or embodiment 96, wherein the first cell population further comprises (v) a fifth genomic modification comprising a polynucleotide coding for a fusion protein of B2M and a subunit of an HLA-1 protein inserted into a site within the second gene or a safe harbor site, whereby the fusion protein is expressed. In embodiment 98 provided herein is the composition of embodiment 97, wherein the first subunit comprises B2M. In embodiment 99 provided herein is the composition of embodiment 97 or embodiment 98, wherein the subunit of an HLA-1 protein comprises HLA-C, HLA-E, or HLA-G. In embodiment 100 provided herein is the composition of embodiment 99, wherein the subunit of an HLA-1 protein comprises HLA-E or HLA-G. In embodiment 101 provided herein is the composition of embodiment 99, wherein the subunit of an HLA-1 protein comprises HLA-E. In embodiment 102 provided herein is the composition of embodiment 99, wherein the subunit of an HLA-1 protein comprises HLA-G. In embodiment 103 provided herein is the composition of any one of embodiments 90 through 102, further comprising a third cell population wherein the third cell population does not contain a modified human cell of either the first or the second cell population. In embodiment 104 provided herein is the composition of embodiment 103, wherein the third cell population comprises at least 1, 2, 3, 4, 5, 6, 7, 8, 9, 10, 15, 20, 25, 30, 35, 40, 45, 50, 55, 60, 65, or 70% and/or no more than 2, 3, 4, 5, 6, 7, 8, 9, 10, 15, 20, 25, 30, 35, 40, 45, 50, 55, 60, 65, or 75% of all of the cells in the plurality of cell populations, for example 1-75% of all the cells in the plurality of cell populations, preferably 1-10%, more preferably 1-20%, even more preferably 1-30%, yet even more preferably 1-40%. In embodiment 105 provided herein is the composition of any one of embodiments 90 through 104, further comprising a fourth cell population wherein the fourth cell population does not contain a modified human cell of either the first, second, or third cell population. In embodiment 106 provided herein is the composition of embodiment 105, wherein the cell population comprises at least 1, 2, 3, 4, 5, 6, 7, 8, 9, 10, 15, 20, 25, 30, 35, 40, 45, 50, 55, 60, 65, or 70% and/or no more than 2, 3, 4, 5, 6, 7, 8, 9, 10, 15, 20, 25, 30, 35, 40, 45, 50, 55, 60, 65, or 75% of all of the cells in the plurality of cell populations, for example 1-75% of all the cells in the plurality of cell populations, preferably 1-10%, more preferably 1-20%, even more preferably 1-30%, yet even more preferably 1-40%. In embodiment 107 provided herein is the composition of any one of embodiments 90 to 106, wherein the cell populations comprise immune cells or stem cells. In embodiment 108 provided herein is the composition of embodiment 107, wherein the cell populations comprise immune cells comprising neutrophils, eosinophils, basophils, mast cells, monocytes, macrophages, dendritic cells, natural killer cells, or a lymphocyte. In embodiment 109 provided herein is the composition of embodiment 107, wherein the cell populations comprise immune cells comprising T cells. In embodiment 110 provided herein is the composition of embodiment 107, wherein the cell populations comprise stem cells comprising human pluripotent stem cells, multipotent stem cells, embryonic stem cells, induced pluripotent stem cells (iPSC), hematopoietic stem cells, or a CD34+ cells. In embodiment 111 provided herein is the composition of embodiment 107, wherein the cell populations comprise stem cells comprising induced pluripotent stem cells (iPSC).

[0347] In embodiment 112 provided herein is a composition comprising a cell comprising a first nucleic acid-guided nuclease system comprising (a) a first nucleic acid-guided nuclease comprising a Type V CRISPR endonuclease, and (b) a first guide nucleic acid, compatible with the first nucleic acid-guided nuclease, comprising a spacer sequence directed at a first target nucleotide sequence in a gene coding for a first subunit of an HLA-1 protein, wherein the first nucleic acid-guided nuclease and the first guide nucleic acid, when complexed, target and cleave at least one strand of DNA at a site at or near the first target nucleotide sequence in the gene coding for the first subunit of an HLA-1 protein. In embodiment 113 provided herein is the composition of embodiment 112, wherein the first subunit comprises B2M. In embodiment 114 provided herein is the composition of embodiment 112, wherein the cell further comprises a first donor template comprising a polynucleotide coding for a fusion protein comprising B2M and a second subunit of an HLA-1 protein. In embodiment 115 provided herein is the composition of embodiment 114, wherein the second subunit of an HLA-1 protein comprises HLA-C, HLA-E, or HLA-G. In embodiment 116 provided herein is the composition of embodiment 114, wherein the second subunit of an HLA-1 protein comprises HLA-E or HLA-G. In embodiment 117 provided herein is the composition of embodiment 114, wherein the second subunit of an HLA-1 protein comprises HLA-E. In embodiment 118 provided herein is the composition of embodiment 114, wherein the second subunit of an HLA-1 protein comprises HLA-G. In embodiment 119 provided herein is the composition of any one of embodiments 112 to 118, wherein the cell further comprises a second nucleic acid-guided nuclease system comprising (c) a second nucleic acid-guided nuclease comprising a Type V CRISPR endonuclease, and (d) a second guide nucleic acid, compatible with the second nucleic acid-guided nuclease, comprising a spacer sequence directed at a second target nucleotide sequence in a gene coding for a subunit of an HLA-2 protein or a transcription factor regulating the expression of one or more subunits of an HLA-2 protein, wherein the second nucleic acid-guided nuclease and the second guide nucleic acid, when complexed, target and cleave at least one strand of DNA at a site at or near the second target nucleotide sequence in the gene coding for a subunit of an HLA-2 protein or a transcription factor regulating the expression of one or more subunits of an HLA-2 protein. In embodiment 120 provided herein is the composition of embodiment 119, wherein the transcription factor comprises CIITA. In embodiment 121 provided herein is the composition of any one of embodiments 112 to 120, wherein the cell further comprises a third nucleic acid-guided nuclease system comprising (e) a third nucleic acid-guided nuclease comprising a Type V CRISPR endonuclease, and (f) a third guide nucleic acid, compatible with the third nucleic acid-guided nuclease, comprising a spacer sequence directed at a third target nucleotide sequence in a gene coding for a subunit of a TCR protein, wherein the third nucleic acid-guided nuclease and the third guide nucleic acid, when complexed, target and cleave at least one strand of DNA at a site at or near the third target nucleotide sequence in the gene coding for the subunit of a TCR protein. In embodiment 122 provided herein is the composition of embodiment 121, wherein the subunit of a TCR protein comprises an alpha subunit or a beta subunit or a TRAC, TRBC, CD3E, CD3D, CD3G, or CD3Z protein. In embodiment 123 provided herein is the composition of embodiment 122, wherein the subunit of a TCR protein is an alpha subunit. In embodiment 124 provided herein is the composition of embodiment 121, wherein the gene coding for the subunit of a TCR protein is a TRAC gene. In embodiment 125 provided herein is the composition of any one of embodiments 121 through 124, wherein the cell further comprises a donor template comprising a polynucleotide coding for a first chimeric antigen receptor (CAR) or portion thereof. In embodiment 126 provided herein is the composition of embodiment 125, wherein the CAR or portion thereof comprises a polypeptide that binds at least one of B7H3, BCMA, GPRC5D, CD8, CD8a, CD19, CD20, CD22, CD28, 4-1BB, or CD3zeta. In embodiment 127 provided herein is the composition of embodiment 126, wherein the CAR or portion thereof comprises a polypeptide at least 60, at least 70, at least 80, at least 90, at least 95, at least 99%, or 100% identical to any one of the amino acid sequences of SEQ ID NOs: 86-124. In embodiment 128 provided herein is the composition of embodiment 125, wherein the CAR or portion thereof comprises a polypeptide that binds at least one of B7H3, BCMxA, GPRC5D, CD8, CD8a, CD20, CD22, CD28, 4-1BB, or CD3zeta. In embodiment 129 provided herein is the composition of embodiment 128, wherein the CAR or portion thereof comprises a polypeptide at least 60, at least 70, at least 80, at least 90, at least 95, at least 99%, or 100% identical to any one of the amino acid sequences of SEQ ID NOs: 86-104 or 116-124. In embodiment 130 provided herein is a composition comprising a cell comprising a first nucleic acid-guided nuclease system comprising (a) a first nucleic acid-guided nuclease comprising a Type V CRISPR endonuclease, and (b) a first guide nucleic acid, compatible with the first nucleic acid-guided nuclease, comprising a spacer sequence directed at a first target nucleotide sequence in a gene coding for a subunit of an HLA-2 protein, or to a transcription factor regulating expression of one or more genes coding for one or more subunits of HLA-2 proteins, wherein the first nucleic acid-guided nuclease and the first guide nucleic acid, when complexed, target and cleave at least one strand of DNA at a site at or near the first target nucleotide sequence in the gene coding for a subunit of an HLA-2 protein, or to a transcription factor regulating expression of one or more genes coding for one or more subunits of HLA-2 proteins. In embodiment 131 provided herein is the composition of embodiment 130, wherein the transcription factor comprises CIITA. In embodiment 132 provided herein is the composition of embodiment 130 or 131, wherein the cell further comprises a second nucleic acid-guided nuclease system comprising (c) a second nucleic acid-guided nuclease comprising a Type V CRISPR endonuclease, and (d) a second guide nucleic acid, compatible with the second nucleic acid-guided nuclease, comprising a spacer sequence directed at a second target nucleotide sequence in a gene coding for a subunit of a TCR protein, wherein the second nucleic acid-guided nuclease and the second guide nucleic acid, when complexed, target and cleave at least one strand of DNA at a site at or near the second target nucleotide sequence in the gene coding for the subunit of a TCR protein. In embodiment 133 provided herein is the composition of embodiment 132, wherein the subunit of a TCR protein comprises an alpha subunit or a beta subunit or a TRAC, TRBC, CD3E, CD3D, CD3G, or CD3Z protein. In embodiment 134 provided herein is the composition of embodiment 133, wherein the subunit of a TCR protein is an alpha subunit. In embodiment 135 provided herein is the composition of embodiment 132, wherein the gene coding for the subunit of a TCR protein is a TRAC gene. In embodiment 136 provided herein is the composition of any one of embodiments 132 through 135, wherein the cell further comprises a donor template comprising a polynucleotide coding for a first chimeric antigen receptor (CAR) or portion thereof. In embodiment 137 provided herein is the composition of embodiment 136, wherein the CAR or portion thereof comprises a polypeptide that binds at least one of B7H3, BCMA, GPRC5D, CD8, CD8a, CD19, CD20, CD22, CD28, 4-1BB, or CD3zeta. In embodiment 138 provided herein is the composition of embodiment 137, wherein the CAR or portion thereof comprises a polypeptide at least 60, at least 70, at least 80, at least 90, at least 95, at least 99%, or 100% identical to any one of the amino acid sequences of SEQ ID NOs: 86-124. In embodiment 139 provided herein is the composition of embodiment 136, wherein the CAR or portion thereof comprises a polypeptide that binds at least one of B7H3, BCMxA, GPRC5D, CD8, CD8a, CD20, CD22, CD28, 4-1BB, or CD3zeta. In embodiment 140 provided herein is the composition of embodiment 139, wherein the CAR or portion thereof comprises a polypeptide at least 60, at least 70, at least 80, at least 90, at least 95, at least 99%, or 100% identical to any one of the amino acid sequences of SEQ ID NOs: 86-104 or 116-124. In embodiment 141 provided herein is a composition comprising a cell comprising a first nucleic acid-guided nuclease system comprising (a) a first nucleic acid-guided nuclease comprising a Type V CRISPR endonuclease, and (b) a first guide nucleic acid, compatible with the nucleic acid-guided nuclease, comprising a spacer sequence directed at a first target nucleotide sequence in a gene coding for a subunit of a TCR protein, wherein the first nucleic acid-guided nuclease and the first guide nucleic acid, when complexed, target and cleave at least one strand of DNA at a site at or near the first target nucleotide sequence in the gene coding for the subunit of a TCR protein. In embodiment 142 provided herein is the composition of embodiment 141, wherein the subunit of a TCR protein comprises an alpha subunit or a beta subunit or a TRAC, TRBC, CD3E, CD3D, CD3G, or CD3Z protein. In embodiment 143 provided herein is the composition of embodiment 142, wherein the subunit of a TCR protein is an alpha subunit. In embodiment 144 provided herein is the composition of any one of embodiment 141, wherein the gene coding for the subunit of a TCR protein is a TRAC gene. In embodiment 145 provided herein is the composition of any one of embodiments 141 through 144, wherein the cell further comprises a donor template comprising a polynucleotide coding for a first chimeric antigen receptor (CAR) or portion thereof. In embodiment 146 provided herein is the composition of embodiment 145, wherein the CAR or portion thereof comprises a polypeptide that binds at least one of B7H3, BCMA, GPRC5D, CD8, CD8a, CD19, CD20, CD22, CD28, 4-1BB, or CD3zeta. In embodiment 147 provided herein is the composition of embodiment 146, wherein the CAR or portion thereof comprises a polypeptide at least 60, at least 70, at least 80, at least 90, at least 95, at least 99%, or 100% identical to any one of the amino acid sequences of SEQ ID NOs: 86-124. In embodiment 148 provided herein is the composition of embodiment 145, wherein the CAR or portion thereof comprises a polypeptide that binds at least one of B7H3, BCMxA, GPRC5D, CD8, CD8a, CD20, CD22, CD28, 4-1BB, or CD3zeta. In embodiment 149 provided herein is the composition of embodiment 148, wherein the CAR or portion thereof comprises a polypeptide at least 60, at least 70, at least 80, at least 90, at least 95, at least 99%, or 100% identical to any one of the amino acid sequences of SEQ ID NOs: 86-104 or 116-124. In embodiment 150 provided herein is the composition of any one of embodiments 112 to 149, wherein the nucleic acid-guided nuclease comprises an engineered, non-naturally occurring nuclease. In embodiment 151 provided herein is the composition of any one of embodiments 112 to 150, wherein the nucleic acid-guided nuclease comprises a Class 1 or a Class 2 nuclease. In embodiment 152 provided herein is the composition of embodiment 151, wherein the nucleic acid-guided nuclease comprises a Type II or a Type V nuclease. In embodiment 153 provided herein is the composition of embodiment 152, wherein the nucleic acid-guided nuclease comprises a Type V-A, V-B, V-C, V-D, or V-E nuclease. In embodiment 154 provided herein is the composition of embodiment 153, wherein the nucleic acid-guided nuclease comprises a Type V-A nuclease. In embodiment 155 provided herein is the composition of embodiment 154, wherein the nucleic acid-guided nuclease comprises a MAD nuclease, an ART nuclease, or an ABW nuclease. In embodiment 156 provided herein is the composition of embodiment 155, wherein the nucleic acid-guided nuclease comprises an amino acid sequence at least 80%, at least 85%, at least 90%, at least 95%, at least 99%, or 100% identical to an amino acid sequence of a MAD, ART, or ABW nuclease. In embodiment 157 provided herein is the composition of embodiment 155, wherein the nucleic acid-guided nuclease comprises a MAD1, MAD2, MAD3, MAD4, MAD5, MAD6, MAD7, MAD8, MAD9, MAD10, MAD11, MAD12, MAD13, MAD14, MAD15, MAD16, MAD17, MAD18, MAD19, or MAD20 nuclease. In embodiment 158 provided herein is the composition of embodiment 155, wherein the nucleic acid-guided nuclease comprises an ART1, ART2, ART3, ART4, ART5, ART6, ART7, ART8, ART9, ART10, ART11, ART11*, ART12, ART13, ART14, ART15, ART16, ART17, ART18, ART19, ART20, ART21, ART22, ART23, ART24, ART25, ART26, ART27, ART28, ART29, ART30, ART31, ART32, ART33, ART34, or ART35 nuclease. In embodiment 159 provided herein is the composition of embodiment 155, wherein the nucleic acid-guided nuclease comprises an amino acid sequence at least 80%, at least 85%, at least 90%, at least 95%, at least 99%, or 100% identical, to the amino acid sequence of MAD2, MAD7, ART2, ART11, or ART11*. In embodiment 160 provided herein is the composition of embodiment 155, wherein the nucleic acid-guided nuclease comprises an amino acid sequence that is at least 80%, at least 85%, at least 90%, at least 95%, 99%, or 100% identical, to the amino acid sequence of SEQ ID NO: 37. In embodiment 161 provided herein is the composition of any one of embodiments 150 to 160, wherein the nucleic acid-guided nuclease further comprises at least one nuclear localization signal (NLS), at least one purification tag, and/or at least one cleavage site. In embodiment 162 provided herein is the composition of embodiment 161, wherein the nucleic acid-guided nuclease comprises at least 4 nuclear localization signals (NLS). In embodiment 163 provided herein is the composition of embodiment 162, wherein the nucleic acid-guided nuclease comprises one N-terminal and three C-terminal nuclease localization signals (NLS). In embodiment 164 provided herein is the composition of embodiment 161 through 163, wherein the nuclear localization signals comprise any one of SEQ ID NOs: 40-56. In embodiment 165 provided herein is the composition of embodiment 164, wherein the NLS comprises SEQ ID NOs: 40, 51, and 56. In embodiment 166 provided herein is the composition of any one of embodiments 112 to 165, wherein the guide nucleic acid comprises (i) a targeter nucleic acid comprising a targeter stem sequence and the spacer sequence, and (ii) a modulator nucleic acid comprising a modulator stem sequence complementary to the targeter stem sequence, and, optionally, a 5′ sequence. In embodiment 167 provided herein is the composition of embodiment 166, wherein the guide nucleic acid comprises a single polynucleotide. In embodiment 168 provided herein is the composition of embodiment 166 or embodiment 167, wherein the guide nucleic acid comprises an engineered, non-naturally occurring guide nucleic acid. In embodiment 169 provided herein is the composition of embodiment 166 or embodiment 168, wherein the targeter nucleic acid and the modulator nucleic acid are separate polynucleotides. In embodiment 170 provided herein is the composition of embodiment 169, wherein the dual guide nucleic acid is capable of binding to and activating a nucleic acid-guided nuclease, that, in a naturally occurring system, is activated by a single crRNA in the absence of a tracrRNA. In embodiment 171 provided herein is the composition of any one of embodiments 112 through 170, wherein the guide nucleic acid further comprises a donor template recruiting sequence. In embodiment 172 provided herein is the composition of any one of embodiments 112 through 171, wherein the target nucleotide sequence is within at least 10, 20, 30, 40, or 50 nucleotides of a protospacer adjacent motif (PAM) that is recognized by the nucleic acid-guided nuclease. In embodiment 173 provided herein is the composition of any one of embodiments 166 through 172, wherein the guide nucleic acid comprises a spacer sequence at least 80%, at least 85%, at least 90%, at least 95%, at least 99.5%, or 100% identical to any one of any one of SEQ ID NOs: 125-2019. In embodiment 174 provided herein is the composition of any one of embodiments 112 through 173, wherein some or all of the guide nucleic acid comprises RNA. In embodiment 175 provided herein is the composition of embodiment 174, wherein at least 50%, at least 70%, at least 90%, at least 95%, or 100% of the guide nucleic acid comprises RNA. In embodiment 176 provided herein is the composition of any one of embodiments 112 through 175, wherein the guide nucleic acid comprises one or more chemical modifications to one or more nucleotides and/or internucleotide linkages at or near the 5′ end, at or near the 3′ end, and/or both. In embodiment 177 provided herein is the composition of embodiment 176, wherein the chemical modification comprises a 2′-O-alkyl, a 2′-O-methyl, a phosphorothioate, a phosphonoacetate, a thiophosphonoacetate, a 2′-O-methyl-3′-phosphorothioate, a 2′-O-methyl-3′-phosphonoacetate, a 2′-O-methyl-3′-thiophosphonoacetate, a 2′-deoxy-3′-phosphonoacetate, a 2′-deoxy-3′-thiophosphonoacetate, or a combination thereof. In embodiment 178 provided herein is the composition of any one of embodiments 112 through 177, wherein the donor template comprises single-stranded DNA, linear single-stranded RNA, linear double-stranded DNA, linear double-stranded RNA, circular single-stranded DNA, circular single-stranded RNA, circular double-stranded DNA, or circular double-stranded RNA. In embodiment 179 provided herein is the composition of any one of embodiments 114 through 118, 125 through 129, 136 through 140, or 145 through 149, wherein the donor template comprises two homology arms. In embodiment 180 provided herein is the composition of embodiment 179, wherein the homology arms comprise at least 50, 100, 150, 200, 250, 300, 350, 400, 450, 500, 600, 700, 800, or 900 and/or at most 100, 150, 200, 250, 300, 350, 400, 450, 500, 600, 700, 800, 900, or 1000 nucleotides, for example 50-1000 nucleotides, preferably 100-800 nucleotides, more preferably 250-750 nucleotides, even more preferably 400-600 nucleotides. In embodiment 181 provided herein is the composition of any one of embodiments 114 through 118, 125 through 129, 136 through 140, or 145 through 149, wherein the donor template comprises a mutation in a PAM sequence to partially or completely abolish binding of the RNP to the DNA. In embodiment 182 provided herein is the composition of any one of embodiments 114 through 118, 125 through 129, 136 through 140, or 145 through 149, wherein the donor template comprises one or more promoters. In embodiment 183 provided herein is the composition of embodiment 182, wherein the promoter shares at least 70%, at least 75%, at least 80%, at least 85%, at least 90%, at least 95%, at least 99.5%, or 100% sequence identity with any one of SEQ ID NOs: 78-85. In embodiment 184 provided herein is the composition of any one of embodiments 114 through 118, 125 through 129, 136 through 140, or 145 through 149, wherein the donor template comprises one or more chemical modifications to one or more nucleotides and/or internucleotide linkages at or near the 5′ end, at or near the 3′ end, or both. In embodiment 185 provided herein is the composition of embodiment 184, wherein the chemical modification comprises a 2′-O-alkyl, a 2′-O-methyl, a phosphorothioate, a phosphonoacetate, a thiophosphonoacetate, a 2′-O-methyl-3′-phosphorothioate, a 2′-O-methyl-3′-phosphonoacetate, a 2′-O-methyl-3′-thiophosphonoacetate, a 2′-deoxy-3′-phosphonoacetate, a 2′-deoxy-3′-thiophosphonoacetate, a suitable alternative, or a combination thereof. In embodiment 186 provided herein is the composition of any one of embodiments 112 through 185, wherein the cell comprises an immune cell or a stem cell. In embodiment 187 provided herein is the composition of embodiment 186, wherein the cell comprises an immune cell comprising a neutrophil, cosinophil, basophil, mast cell, monocyte, macrophage, dendritic cell, natural killer cell, or a lymphocyte. In embodiment 188 provided herein is the composition of embodiment 186, wherein the cell comprises a T cell. In embodiment 189 provided herein is the composition of embodiment 186, wherein the cell comprises a stem cell comprising a human pluripotent, multipotent stem cell, embryonic stem cell, induced pluripotent stem cell, hematopoietic stem cell, or a CD34+ cell. In embodiment 190 provided herein is the composition of embodiment 186, wherein the cell comprises a stem cell comprising an iPSC.

[0348] In embodiment 191 provided herein is a composition comprising (a) a first guide nucleic acid comprising a spacer sequence complementary to a target nucleotide sequence within a B2M gene, (b) a second guide nucleic acid comprising a spacer sequence complementary to a target nucleotide sequence within a CIITA gene, (c) a third guide nucleic acid comprising a spacer sequence complementary to a target nucleotide sequence within a TCR subunit gene, and (d) one or more nucleic acid-guided nucleases optionally complexed with one or more of the guide nucleic acids of (a), (b), or (c). In embodiment 192 provided herein is the composition of embodiment 191, wherein the gene coding for a subunit of a TCR is a TRAC gene. In embodiment 193 provided herein is the composition of embodiment 191 or 192, wherein the one or more nucleic acid-guided nucleases comprise Class 1 or a Class 2 nucleases. In embodiment 194 provided herein is the composition of embodiment 193, wherein the one or more nucleic acid-guided nucleases comprise Type II or a Type V nuclease. In embodiment 195 provided herein is the composition of embodiment 193, wherein the one or more nucleic acid-guided nucleases comprise Type V-A, V-B, V-C, V-D, or V-E nucleases. In embodiment 196 provided herein is the composition of embodiment 193, wherein the one or more nucleic acid-guided nucleases comprise Type V-A nucleases. In embodiment 197 provided herein is the composition of embodiment 193, wherein the one or more nucleic acid-guided nucleases comprise a MAD nuclease, an ART nuclease, or an ABW nuclease. In embodiment 198 provided herein is the composition of embodiment 193, wherein the one or more nucleic acid-guided nucleases each comprise an amino acid sequence at least 80%, at least 85%, at least 90%, at least 95%, or at least 99% identical to the amino acid sequence of MAD, ART, or ABW nuclease. In embodiment 199 provided herein is the composition of embodiment 193, wherein the one or more nucleic acid-guided nucleases each comprise a MAD1, MAD2, MAD3, MAD4, MAD5, MAD6, MAD7, MAD8, MAD9, MAD10, MAD11, MAD12, MAD13, MAD14, MAD15, MAD16, MAD17, MAD18, MAD19, or MAD20 nuclease. In embodiment 200 provided herein is the composition of embodiment 193, wherein the one or more nucleic acid-guided nucleases each comprise an ARTI, ART2, ART3, ART4, ART5, ART6, ART7, ART8, ART9, ART10, ART11, ART11*, ART12, ART13, ART14, ART15, ART16, ART17, ART18, ART19, ART20, ART21, ART22, ART23, ART24, ART25, ART26, ART27, ART28, ART29, ART30, ART31, ART32, ART33, ART34, or ART35 nuclease. In embodiment 201 provided herein is the composition of embodiment 193, wherein the one or nucleic acid-guided nucleases each comprise an amino acid sequence at least 80%, at least 85%, at least 90%, at least 95%, or at least 99% identical to the amino acid sequence of MAD2, MAD7, ART2, ART11, or ART11*. In embodiment 202 provided herein is the composition of any one of embodiments 191 through 201, wherein the first, second, and/or third guide nucleic acids comprise (i) a targeter nucleic acid comprising a targeter stem sequence and a spacer sequence, and (ii) a modulator nucleic acid comprising a modulator stem sequence complementary to the targeter stem sequence, and, optionally, a 5′ sequence. In embodiment 203 provided herein is the composition of embodiment 202, wherein the targeter nucleic acid and the modulator nucleic acid comprise a single polynucleotide. In embodiment 204 provided herein is the composition of embodiment 202 or embodiment 203, wherein the guide nucleic acid comprises an engineered, non-naturally occurring guide nucleic acid. In embodiment 205 provided herein is the composition of embodiment 202 or embodiment 204, wherein the guide nucleic acid comprises a dual guide nucleic acid, wherein the targeter nucleic acid and the modulator nucleic acid are separate polynucleotides. In embodiment 206 provided herein is the composition of embodiment 205, wherein the dual guide nucleic acid is capable of binding to and activating a nucleic acid-guided nuclease, that, in a naturally occurring system, is activated by a single crRNA in the absence of a tracrRNA. In embodiment 207 provided herein is the composition of any one of embodiments 202 through 206, wherein the target nucleotide sequence is within at least 10, 20, 30, 40, or 50 nucleotides of a protospacer adjacent motif (PAM) that is recognized by the nucleic acid-guided nuclease. In embodiment 208 provided herein is the composition of any one of embodiments 202 through 207, wherein the guide nucleic acid further comprises a donor template recruiting sequence. In embodiment 209 provided herein is the composition of any one of embodiments 202 through 208, wherein the guide nucleic acid comprises a spacer sequence is at least 80%, at least 85%, at least 90%, at least 95%, at least 99.5%, or 100% identical to any one of any one of SEQ ID NOs: 125-2019. In embodiment 210 provided herein is the composition of any one of embodiments 202 through 209, wherein some or all of the guide nucleic acid is RNA. In embodiment 211 provided herein is the composition of embodiment 210, wherein at least 50%, at least 70%, at least 90%, at least 95%, or 100% of the guide nucleic acid comprises RNA. In embodiment 212 provided herein is the composition of any one of embodiments 202 through 211, wherein the guide nucleic acid comprises one or more chemical modifications to one or more nucleotides and/or internucleotide linkages at or near the 5′ end, at or near the 3′ end, and/or both. In embodiment 213 provided herein is the composition of embodiment 212, wherein the chemical modification comprises a 2′-O-alkyl, a 2′-O-methyl, a phosphorothioate, a phosphonoacetate, a thiophosphonoacetate, a 2′-O-methyl-3′-phosphorothioate, a 2′-O-methyl-3′-phosphonoacetate, a 2′-O-methyl-3′-thiophosphonoacetate, a 2′-deoxy-3′-phosphonoacetate, a 2′-deoxy-3′-thiophosphonoacetate, a suitable alternative, or a combination thereof. In embodiment 214 provided herein is the composition of any one of embodiments 191 to 213, further comprising (e) a first donor template comprising a first transgene. In embodiment 215 provided herein is the composition of embodiment 214, wherein the first transgene comprises a polynucleotide encoding a fusion protein comprising B2M and HLA-A, -B, -C, -D, -E, -F, or -G. In embodiment 216 provided herein is the composition of embodiment 215, wherein the fusion protein comprises HLA-C, -E, or -G. In embodiment 217 provided herein is the composition of embodiment 216, wherein the fusion protein comprises HLA-E or HLA-G. In embodiment 218 provided herein is the composition of embodiment 217, wherein the fusion protein comprises HLA-E. In embodiment 219 provided herein is the composition of embodiment 217, wherein the fusion protein comprises HLA-G. In embodiment 220 provided herein is the composition of any one of embodiments 214 to 219, wherein the first donor template comprises homology arms, wherein the first homology arm is complementary to a region upstream and the second homology arm is complementary to a region downstream of a cleavage site within a B2M gene. In embodiment 221 provided herein is the composition of any one of embodiments 191 through 220, further comprising (f) a second donor template comprising a second transgene. In embodiment 222 provided herein is the composition of embodiment 221, wherein the second transgene comprises a first portion of a polynucleotide coding for a first chimeric antigen receptor (CAR). In embodiment 223 provided herein is the composition of embodiment 222, wherein the CAR or portion thereof comprises a polypeptide that binds at least one of B7H3, BCMA, GPRC5D, CD8, CD8a, CD19, CD20, CD22, CD28, 4-1BB, or CD3zeta. In embodiment 224 provided herein is the composition of embodiment 223, wherein the CAR or portion thereof comprises a polypeptide at least 60, at least 70, at least 80, at least 90, at least 95, at least 99%, or 100% identical to any one of the amino acid sequences of SEQ ID NOs: 86-124. In embodiment 225 provided herein is the composition of embodiment 221, wherein the CAR or portion thereof comprises a polypeptide that binds at least one of B7H3, BCMA, GPRC5D, CD8, CD8a, CD20, CD22, CD28, 4-1BB, or CD3zeta. In embodiment 226 provided herein is the composition of embodiment 225, wherein the CAR or portion thereof comprises a polypeptide at least 60, at least 70, at least 80, at least 90, at least 95, at least 99%, or 100% identical to any one of the amino acid sequences of SEQ ID NOs: 86-104 or 116-124. In embodiment 227 provided herein is the composition of any one of embodiments 222 through 226, further comprising a second portion of the polynucleotide, wherein the second portion codes for a second CAR or portion thereof, different from the first CAR or portion thereof. In embodiment 228 provided herein is the composition of any one of embodiments 221 to 227, wherein the second donor template comprises homology arms, wherein the first homology arm is complementary to a region upstream and the second homology arm is complementary to a region downstream of a cleavage site within a TRC subunit gene. In embodiment 229 provided herein is the composition of any one of embodiments 191 through 228, further comprising (g) a third donor template comprising a third transgene. In embodiment 230 provided herein is the composition of any one of embodiments 214 to 229, wherein the donor template comprises single-stranded DNA, linear single-stranded RNA, linear double-stranded DNA, linear double-stranded RNA, circular single-stranded DNA, circular single-stranded RNA, circular double-stranded DNA, or circular double-stranded RNA. In embodiment 231 provided herein is the composition of any one of embodiments 214 to 230, wherein the donor template comprises a mutation in a PAM sequence to partially or completely abolish binding of the RNP to the DNA. In embodiment 232 provided herein is the composition of any one of embodiments 214 to 231, wherein the donor template comprises one or more promoters. In embodiment 233 provided herein is the composition of embodiment 232, wherein the promoter shares at least 70%, at least 75%, at least 80%, at least 85%, at least 90%, at least 95%, at least 99.5% sequence identity with any one of SEQ ID NOs: 78-85. In embodiment 234 provided herein is the composition of any one of embodiments 214 to 233, wherein the donor template comprises one or more chemical modifications to one or more nucleotides and/or internucleotide linkages at or near the 5′ end, at or near the 3′ end, or both In embodiment 235 provided herein is the composition of embodiment 234, wherein the chemical modification comprises a 2′-O-alkyl, a 2′-O-methyl, a phosphorothioate, a phosphonoacetate, a thiophosphonoacctate, a 2′-O-methyl-3′-phosphorothioate, a 2′-O-methyl-3′-phosphonoacetate, a 2′-O-methyl-3′-thiophosphonoacetate, a 2′-deoxy-3′-phosphonoacetate, a 2′-deoxy-3′-thiophosphonoacetate, a suitable alternative, or a combination thereof.

[0349] In embodiment 236 provided herein is a modified cell that (a) partially or completely lacks cell surface-expressed (i) active HLA-1 protein, (ii) active HLA-2 protein, or (iii) active TCR protein, and (b) comprises one or more (i) CAR proteins expressed on the cell surface and (ii) fusion proteins comprising HLA-E or HLA-G expressed on the cell surface. In embodiment 237 provided herein is the modified cell of 236, wherein the cell comprises a human cell. In embodiment 238 provided herein is the modified cell of 237, wherein the human cell comprises an immune cell or a stem cell. In embodiment 239 provided herein is the modified cell of 238, wherein the immune cell comprises a neutrophil, cosinophil, basophil, mast cell, monocyte, macrophage, dendritic cell, natural killer cell, or a lymphocyte. In embodiment 240 provided herein is the modified cell of 238, wherein the immune cell comprises a T cell. In embodiment 241 provided herein is the modified cell of 238, wherein the stem cell comprises a human pluripotent, multipotent stem cell, embryonic stem cell, induced pluripotent stem cell, hematopoietic stem cell, CD34+ cell.

[0350] In embodiment 242 provided herein is a human cell comprising (a) a first, and optionally a second and/or third nucleic acid-guided nuclease, wherein at least one of the nucleases comprises a CRISPR endonuclease, and (b) at least one of (i) a first guide nucleic acid directed at a first target nucleotide sequence in a gene coding for a subunit of an HLA-1 protein, (ii) a second guide nucleic acid directed at a second target nucleotide sequence in a gene coding for a subunit of an HLA-2 protein or a transcription factor for one or more genes coding for a subunit of an HLA-2 protein, and (iii) a third guide nucleic acid directed at a third target nucleotide sequence coding for a subunit of a TCR. In embodiment 243 provided herein is the human cell of embodiment 242, further comprising (c) a donor template comprising a polynucleotide coding for a chimeric antigen receptor (CAR) protein or part of a CAR. In embodiment 244 provided herein is the human cell of embodiment 243, wherein the protein comprises a protein directed at B7H3, BCMA, GPRC5D, CD19, CD20, CD22, or a combination thereof. In embodiment 245 provided herein is the human cell of embodiment 244, wherein the CAR or portion thereof comprises a polypeptide at least 60, at least 70, at least 80, at least 90, at least 95, at least 99%, or 100% identical to any one of the amino acid sequences of SEQ ID NOS: 86-124. In embodiment 246 provided herein is the human cell of any one of embodiments 243 through 245, wherein the donor template comprises homology arms for insertion at a cleavage site in the subunit of the TCR to which the guide nucleic acid is directed. In embodiment 247 provided herein is the human cell of any one of embodiments 242 to 243, further comprising (d) a donor template comprising a polynucleotide coding an HLA-A, HLA-B, HLA-C, HLA-D, HLA-E, HLA-F, or HLA-G protein. In embodiment 248 provided herein is the human cell of any one of embodiments 242 to 247, wherein the human cell comprises an immune cell or a stem cell. In embodiment 249 provided herein is the human cell of embodiment 248, wherein the human cell comprises an immune cell comprising a neutrophil, cosinophil, basophil, mast cell, monocyte, macrophage, dendritic cell, natural killer cell, or a lymphocyte. In embodiment 250 provided herein is the human cell of embodiment 248, wherein the human cell comprises an immune cell comprising a T cell. In embodiment 251 provided herein is the human cell of embodiment 248, wherein human cell comprises a stem cell comprising a human pluripotent, multipotent stem cell, embryonic stem cell, induced pluripotent stem cell, hematopoietic stem cell, CD34+ cell. In embodiment 252 provided herein is the human cell of embodiment 251, wherein human cell comprises a stem cell comprising an induced pluripotent stem cell.

[0351] In embodiment 253 provided herein is a modified human cell comprising (a) reduced or eliminated B2M and knock-in of HLA-E or HLA-G or (b) reduced or eliminated TCR and knock-in. In embodiment 254 provided herein is the modified human cell of embodiment 253, wherein the human cell comprises an immune cell or a stem cell. In embodiment 255 provided herein is the modified human cell of 254, wherein the human cell comprises an immune cell comprising a neutrophil, cosinophil, basophil, mast cell, monocyte, macrophage, dendritic cell, natural killer cell, or a lymphocyte. In embodiment 256 provided herein is the modified human cell of 254, wherein the human cell comprises an immune cell comprising a T cell. In embodiment 257 provided herein is the modified human cell of 254, wherein the human cell comprises a stem cell comprising a human pluripotent, multipotent stem cell, embryonic stem cell, induced pluripotent stem cell, hematopoietic stem cell, CD34+ cell. In embodiment 258 provided herein is the modified human cell of 254, wherein the human cell comprises an induced pluripotent stem cell.

[0352] In embodiment 259 provided herein is a human stem cell comprising (a) a first genomic modification in an endogenous B2M gene that partially or completely eliminates expression of the endogenous B2M, (b) a second genomic modification in a CIITA gene that partially or completely eliminates expression of the CIITA, and (c) a third genomic modification in a TCR subunit gene that partially or completely eliminates expression of the TCR subunit. In embodiment 260 provided herein is the human stem cell of embodiment 259, wherein the cell comprises an iPSC. In embodiment 261 provided herein is the human stem cell of embodiment 259 or 260, further comprising (d) an exogenous polynucleotide encoding for a fusion protein comprising one or more HLA-A, -B, -C, -D, -E, -F, or -G protein inserted into the B2M gene. In embodiment 262 provided herein is the human stem cell of any of embodiments 259 to 261, further comprising (c) an exogenous polynucleotide encoding for one or more CARs inserted into the TCR subunit gene. In embodiment 263 provided herein is the human stem cell of embodiment 262, wherein the CAR or portion thereof comprises a polypeptide that binds at least one of BCMA, GPRC5D, CD8, CD8a, CD19, CD20, CD22, CD28, 4-1BB, or CD3zeta.

[0353] In embodiment 264 provided herein is a method for treating a disorder comprising administering to an individual suffering from a disorder an effective amount of a composition comprising a composition of any one of the embodiments 1 through 190 or 236 through 263.

[0354] In embodiment 265 provided herein is a method of producing a non-immunogenic CAR T cell comprising (a) modifying a genome of a cell to reduce or eliminate cell surface expression of active HLA-1 proteins in the cell and its progeny, (b) introducing into the genome of the cell or one or more of its progeny a first polynucleotide coding for surface expression of a first CAR or portion thereof specific for a first antigen, and (c) introducing into the genome of the cell or one or more of its progeny a second polynucleotide coding for surface expression of a second CAR or portion thereof specific for a second antigen. In embodiment 266 provided herein is the method of embodiment 265, wherein modifying genome of a cell to reduce or eliminate cell surface expression of active HLA-1 proteins comprises introducing a genomic modification into a B2M gene that partially or completely inactivates the B2M gene. In embodiment 267 provided herein is the method of embodiment 266, wherein modifying the genome comprises introducing a substitution, an insertion, a deletion, a nonsense mutation, or a truncation. In embodiment 268 provided herein is the method of embodiment 267, wherein the genomic modification comprises inserting a first transgene into a site within the B2M gene, wherein the first transgene codes for a B2M-HLA subunit fusion protein. In embodiment 269 provided herein is the method of embodiment 268, wherein the HLA subunit of the B2M-HLA subunit fusion protein comprises an HLA-C, -E, or -G subunit. In embodiment 270 provided herein is the method of embodiment 268, wherein the HLA subunit of the B2M-HLA subunit fusion protein comprises an HLA-E or -G subunit. In embodiment 271 provided herein is the method of embodiment 268, wherein the HLA subunit of the B2M-HLA subunit fusion protein comprises an HLA-E. In embodiment 272 provided herein is the method of embodiment 268, wherein the HLA subunit of the B2M-HLA subunit fusion protein comprises an HLA-G. In embodiment 273 provided herein is the method of any one of embodiments 265 through 272, wherein the first and/or second CAR or portion thereof comprises a CAR or portion thereof that binds B7H3, BCMA, GPRC5D, CD8, CD8a, CD19, CD20, CD22, CD28, 4-1BB, or CD3zeta. In embodiment 274 provided herein is the method of embodiment 273, wherein the CAR or portion thereof comprises a polypeptide at least 60, at least 70, at least 80, at least 90, at least 95, at least 99%, or 100% identical to any one of the amino acid sequences of SEQ ID NOs: 86-124. In embodiment 275 provided herein is the method of any one of embodiments 265 through 272, wherein the first and/or second CAR or portion thereof comprises a CAR or portion thereof that binds B7H3, BCMA, GPRC5D, CD8, CD8a, CD20, CD22, CD28, 4-1BB, or CD3zeta. In embodiment 276 provided herein is the method of embodiment 275, wherein the CAR or portion thereof comprises a polypeptide at least 60, at least 70, at least 80, at least 90, at least 95, at least 99%, or 100% identical to any one of the amino acid sequences of SEQ ID NOs: 86-104 or 116-124. In embodiment 277 provided herein is the method of any one of embodiments 265 through 276, wherein the polynucleotide coding for surface expression of a CAR is introduced at a site with a TCR subunit gene or a safe harbor site. In embodiment 278 provided herein is the method of any one of embodiments 265 through 277, further comprising (d) modifying the genome of the cell or one of its progeny to reduce or eliminate cell surface expression of one or more subunits of an HLA-2 protein. In embodiment 279 provided herein is the method of embodiment 278, wherein modifying a genome of the cell or one of its progeny to reduce or eliminate cell surface expression of one or more subunits of an HLA-2 protein comprises introducing a genomic modification into a gene coding for a transcription factor for one or more genes encoding the one or more subunits of an HLA-2 protein that partially or completely inactivates the gene for the transcription factor. In embodiment 280 provided herein is the method of embodiment 279, wherein the genomic modification comprises a substitution, an insertion, a deletion, a nonsense mutation, or a truncation. In embodiment 281 provided herein is the method of embodiment 279 or embodiment 280, wherein the transcription factor comprises CIITA. In embodiment 282 provided herein is the method of any one of embodiments 268 to 281, wherein introducing into the genome comprises delivering into the cell a nucleic acid-guided nuclease system, or one or more polynucleotides encoding for one or more parts of the system, comprising (i) a nucleic acid-guided nuclease and (ii) a guide nucleic acid compatible with and capable of binding to and activating the nucleic acid-guided nuclease, wherein the guide nucleic acid comprises (1) a targeter nucleic acid comprising a targeter stem sequence and a spacer sequence, wherein the spacer sequence is complementary to a target nucleotide sequence within a target polynucleotide of a genome of a human target cell and (2) a modulator nucleic acid comprising a modulator stem sequence complementary to the targeter stem sequence, and, optionally, a 5′ sequence, wherein the nucleic acid-guided nuclease system target and cleave at least one strand in the target polynucleotide at or near the target nucleotide sequence. In embodiment 283 provided herein is the method of embodiment 282, wherein the nucleic acid-guided nuclease comprises a Class 1 or a Class 2 nuclease. In embodiment 284 provided herein is the method of embodiment 283, wherein the nucleic acid-guided nuclease comprises a Type II or a Type V nuclease. In embodiment 285 provided herein is the method of embodiment 284, wherein the nucleic acid-guided nuclease comprises a Type V-A, V-B, V-C, V-D, or V-E nuclease. In embodiment 286 provided herein is the method of embodiment 285, wherein the nucleic acid-guided nuclease comprises a Type V-A nuclease. In embodiment 287 provided herein is the method of embodiment 286, wherein the nucleic acid-guided nuclease comprises a MAD nuclease, an ART nuclease, or an ABW nuclease. In embodiment 288 provided herein is the method of embodiment 286, wherein the nucleic acid-guided nuclease comprises an amino acid sequence at least 80%, at least 85%, at least 90%, at least 95%, at least 99%, or 100% identical to the amino acid sequence of MAD, ART, or ABW nuclease. In embodiment 289 provided herein is the method of embodiment 286, wherein the nucleic acid-guided nuclease comprises a MAD1, MAD2, MAD3, MAD4, MAD5, MAD6, MAD7, MAD8, MAD9, MAD10, MAD11, MAD12, MAD13, MAD14, MAD15, MAD16, MAD17, MAD18, MAD19, or MAD20 nuclease. In embodiment 290 provided herein is the method of embodiment 286, wherein the nucleic acid-guided nuclease comprises an ART1, ART2, ART3, ART4, ART5, ART6, ART7, ART8, ART9, ART10, ART11, ART11*, ART12, ART13, ART14, ART15, ART16, ART17, ART18, ART19, ART20, ART21, ART22, ART23, ART24, ART25, ART26, ART27, ART28, ART29, ART30, ART31, ART32, ART33, ART34, or ART35 nuclease. In embodiment 291 provided herein is the method of embodiment 286, wherein the nucleic acid-guided nuclease comprises an amino acid sequence at least 80%, at least 85%, at least 90%, at least 95%, at least 99%, or 100% identical to the amino acid sequence of MAD2, MAD7, ART2, ART11, or ART11*. In embodiment 292 provided herein is the method of embodiment 286, wherein the nucleic acid-guided nuclease comprises an amino acid sequence that is at least 80%, at least 85%, at least 90%, at least 95%, 99%, or 100% identical, to the amino acid sequence of SEQ ID NO: 37. In embodiment 293 provided herein is the method of any one of embodiments 282 through 292, wherein the nucleic acid-guided nuclease comprises at least one nuclear localization signal (NLS), at least one purification tag, or at least one cleavage site. In embodiment 294 provided herein is the method of embodiment 293, wherein the nucleic acid-guided nuclease comprises at least 4 NLS. In embodiment 295 provided herein is the method of embodiment 294, wherein the nucleic acid-guided nuclease comprises one N-terminal and three C-terminal nuclease localization signals (NLS). In embodiment 296 provided herein is the method of any one of embodiments 293 through 295, wherein the nuclear localization signals comprise any one of SEQ ID NOs: 40-56. In embodiment 297 provided herein is the method of embodiment 296, wherein the NLS comprises SEQ ID NOs: 40, 51, and 56. In embodiment 298 provided herein is the method of embodiment 282 through 297, wherein the guide nucleic acid comprises a single polynucleotide. In embodiment 299 provided herein is the method of embodiment 282 through 297, wherein the guide nucleic acid comprises a dual guide nucleic acid, wherein the targeter nucleic acid and the modulator nucleic acid are separate polynucleotides. In embodiment 300 provided herein is the method of embodiment 299, wherein the dual guide nucleic acid is capable of binding to and activating a nucleic acid-guided nuclease, that, in a naturally occurring system, is activated by a single crRNA in the absence of a tracrRNA. In embodiment 301 provided herein is the method of embodiment 282 through 300, wherein the target nucleotide sequence is within at least 10, at least 20, at least 30, at least 40, or at least 50 nucleotides of a protospacer adjacent motif (PAM) that is recognized by a nuclease with which the guide nucleic acid is compatible. In embodiment 302 provided herein is the method of embodiment 282 through 301, wherein the guide nucleic acid and the nuclease form a nucleic acid-guided nuclease complex. In embodiment 303 provided herein is the method of embodiment 302, wherein the guide nucleic acid further comprises a donor template recruiting sequence. In embodiment 304 provided herein is the method of embodiment 282 through 303, wherein the guide nucleic acid comprises a spacer sequence is at least 80%, at least 85%, at least 90%, at least 95%, at least 99.5%, or 100% identical to any one of any one of SEQ ID NOs: 125-2019. In embodiment 305 provided herein is the method of embodiment 282 through 304, wherein some or all of the guide nucleic acid is RNA. In embodiment 306 provided herein is the method of embodiment 305, wherein at least 50%, at least 70%, at least 90%, at least 95%, or 100% of the guide nucleic acid comprises RNA. In embodiment 307 provided herein is the method of embodiment 282 through 306, wherein the guide nucleic acid comprises one or more chemical modifications to one or more nucleotides and/or internucleotide linkages at or near the 5′ end, at or near the 3′ end, and/or both. In embodiment 308 provided herein is the method of embodiment 307, wherein the chemical modification comprises a 2′-O-alkyl, a 2′-O-methyl, a phosphorothioate, a phosphonoacetate, a thiophosphonoacetate, a 2′-O-methyl-3′-phosphorothioate, a 2′-O-methyl-3′-phosphonoacetate, a 2′-O-methyl-3′-thiophosphonoacetate, a 2′-deoxy-3′-phosphonoacetate, a 2′-deoxy-3′-thiophosphonoacetate, a suitable alternative, or a combination thereof. In embodiment 309 provided herein is the method of embodiment 282 through 308, wherein introducing into the genome further comprises delivering a donor template comprising the transgene. In embodiment 310 provided herein is the method of embodiment 309, wherein the donor template comprises two homology arms flanking the transgene. In embodiment 311 provided herein is the method of embodiment 310, wherein the homology arms comprise at most 1000, at most 900, at most 800, at most 700, at most 600, at most 500 nucleotides. In embodiment 312 provided herein is the method of any one of embodiments 309 through 311, wherein the donor template comprises single-stranded DNA, linear single-stranded RNA, linear double-stranded DNA, linear double-stranded RNA, circular single-stranded DNA, circular single-stranded RNA, circular double-stranded DNA, or circular double-stranded RNA. In embodiment 313 provided herein is the method of any one of embodiments 309 through 312, wherein the donor template comprises a mutation in a PAM sequence to partially or completely abolish binding of the RNP to the DNA. In embodiment 314 provided herein is the method of any one of embodiments 309 through 313, wherein the donor template comprises one or more promoters. In embodiment 315 provided herein is the method of embodiment 314, wherein the promoter shares at least 70%, at least 75%, at least 80%, at least 85%, at least 90%, at least 95%, at least 99.5%, or 100% sequence identity with any one of SEQ ID NOs: 78-85. In embodiment 316 provided herein is the method of any one of embodiments 309 through 315, wherein the donor template comprises one or more chemical modifications to one or more nucleotides and/or internucleotide linkages at or near the 5′ end, at or near the 3′ end, and/or both. In embodiment 317 provided herein is the method of embodiment 316, wherein the chemical modification comprises a 2′-O-alkyl, a 2′-O-methyl, a phosphorothioate, a phosphonoacetate, a thiophosphonoacetate, a 2′-O-methyl-3′-phosphorothioate, a 2′-O-methyl-3′-phosphonoacetate, a 2′-O-methyl-3′-thiophosphonoacetate, a 2′-deoxy-3′-phosphonoacetate, a 2′-deoxy-3′-thiophosphonoacetate, a suitable alternative, or a combination thereof. In embodiment 318 provided herein is the method of any one of embodiments 309 through 317, wherein at least portion of the donor template is inserted by an innate cell repair mechanism at or near the strand break. In embodiment 319 provided herein is the method of embodiment 318, wherein the innate cell repair mechanism comprises homology directed repair (HDR). In embodiment 320 provided herein is the method of any one of embodiments 265 to 319, wherein the cell comprises a human cell. In embodiment 321 provided herein is the method of embodiment 320, wherein the human cell comprises an immune cell or a stem cell. In embodiment 322 provided herein is the method of embodiment 321, wherein the human cell comprises an immune cell comprising a neutrophil, cosinophil, basophil, mast cell, monocyte, macrophage, dendritic cell, natural killer cell, or a lymphocyte. In embodiment 323 provided herein is the method of embodiment 321, wherein the human cell comprises an immune cell comprising a T cell. In embodiment 324 provided herein is the method of embodiment 321, wherein the human cell comprises a stem cell comprising a human pluripotent, multipotent stem cell, embryonic stem cell, induced pluripotent stem cell, hematopoietic stem cell, CD34+ cell. In embodiment 325 provided herein is the method of embodiment 321, wherein the human cell comprises a stem cell comprising an induced pluripotent stem cell. In embodiment 326 provided herein is the method of any one of embodiments 268 to 325, wherein delivering comprises electroporation.

[0355] In embodiment 327 provided herein is a method for producing a population of non-immunogenic CAR T cells comprising (a) modifying a genome of a first cell to reduce or eliminate cell surface expression of HLA-1 proteins in the first cell and its progeny, (b) introducing into the genome of the first cell a first polynucleotide coding for surface expression of a first CAR specific for a first antigen on the first cell, (c) modifying a genome of a second cell to reduce or eliminate cell surface expression of HLA-1 proteins in the second cell and its progeny, and (d) introducing into the genome of the second cell a second polynucleotide coding for surface expression of a second CAR specific for a second antigen on the second cell, wherein the first and second cells are the same cell, the first cell is a progeny of the second cell, or the second cell is a progeny of the first cell.

[0356] In embodiment 328 provided herein is a method of producing a cell with an engineered genome comprising (a) modifying a B2M gene in the genome of a first cell to reduce or eliminate expression of the B2M gene, (b) modifying a T cell receptor (TCR) subunit gene in the genome of a second cell to reduce or eliminate expression of the subunit, (c) modifying a CIITA gene in the genome of a third cell to reduce or eliminate expression of the CIITA gene, and (d) introducing a first transgene into the genome of a fourth cell, wherein the first transgene codes for a B2M-HLA subunit fusion protein. In embodiment 329 provided herein is the method of embodiment 328, wherein (a) through (d) are performed simultaneously, wherein the first, second, third, and fourth cells are the same cell. In embodiment 330 provided herein is the method of embodiment 328, wherein one or more of (a) through (d) are performed sequentially. In embodiment 331 provided herein is the method of embodiment 330, wherein one or more cells resulting from embodiment 330 are propagated prior to performing the remainder of (a) through (d) not performed in embodiment 330. In embodiment 332 provided herein is the method of any one of embodiments 328 through 331, wherein the TCR subunit comprises an alpha subunit or a beta subunit or a TRAC, TRBC, CD3E, CD3D, CD3G, or CD3Z protein. In embodiment 333 provided herein is the method of embodiment 332, wherein the TCR subunit comprises an alpha subunit. In embodiment 334 provided herein is the method of any one of embodiments 328 to 333, wherein the HLA subunit of the B2M-HLA subunit fusion protein comprises an HLA-C, -E, or -G subunit. In embodiment 335 provided herein is the method of embodiment 334, wherein the HLA subunit of the B2M-HLA subunit fusion protein comprises an HLA-E or -G subunit. In embodiment 336 provided herein is the method of embodiment 334, wherein the HLA subunit of the B2M-HLA subunit fusion protein comprises an HLA-E. In embodiment 337 provided herein is the method of embodiment 334, wherein the HLA subunit of the B2M-HLA subunit fusion protein comprises an HLA-G. In embodiment 338 provided herein is the method of any one of embodiments 328 to 337, wherein the first transgene is introduced at a site within the B2M gene. In embodiment 339 provided herein is the method of any one of embodiments 328 to 338, wherein the cell comprises a human cell. In embodiment 340 provided herein is the method of embodiment 339, wherein the human cell comprises an immune cell or a stem cell. In embodiment 341 provided herein is the method of embodiment 340, wherein the human cell comprises an immune cell comprising a neutrophil, cosinophil, basophil, mast cell, monocyte, macrophage, dendritic cell, natural killer cell, or a lymphocyte. In embodiment 342 provided herein is the method of embodiment 340, wherein the human cell comprises an immune cell comprising a T cell. In embodiment 343 provided herein is the method of embodiment 340, wherein the human cell comprises a stem cell comprising a human pluripotent, multipotent stem cell, embryonic stem cell, induced pluripotent stem cell, hematopoietic stem cell, CD34+ cell. In embodiment 344 provided herein is the method of embodiment 340, wherein the human cell comprises a stem cell comprising an induced pluripotent stem cell. In embodiment 345 provided herein is the method of any one of embodiments 328 to 344, further comprising (c) introducing a second transgene into the genome, wherein the second transgene codes for a chimeric antigen receptor (CAR) or portion thereof. In embodiment 346 provided herein is the method of embodiment 345, wherein the second transgene is introduced at a site within the TCR subunit gene. In embodiment 347 provided herein is the method of any one of embodiments 345 to 346, wherein the CAR or portion thereof comprises polypeptide that binds to B7H3, BCMA, GPRC5D, CD8, CD8a, CD19, CD20, CD22, CD28, 4-1BB, or CD3zeta. In embodiment 348 provided herein is the method of embodiment 347, wherein the CAR or portion thereof comprises a polypeptide at least 60, at least 70, at least 80, at least 90, at least 95, at least 99%, or 100% identical to any one of the amino acid sequences of SEQ ID NOs: 86-124. In embodiment 349 provided herein is the method of any one of embodiments 345 to 346, wherein the CAR or portion thereof comprises a polypeptide that binds at least one of B7H3, BCMA, GPRC5D, CD8, CD8a, CD20, CD22, CD28, 4-1BB, or CD3zeta. In embodiment 350 provided herein is the method of embodiment 349, wherein the CAR or portion thereof comprises a polypeptide at least 60, at least 70, at least 80, at least 90, at least 95, at least 99%, or 100% identical to any one of the amino acid sequences of SEQ ID NOs: 86-104 or 116-124. In embodiment 351 provided herein is the method of any one of embodiments 328 to 350, wherein the modifying of step (a) comprises contacting DNA of the genome with a first nucleic acid-guided nuclease complexed with a first compatible guide nucleic acid (gNA) targeted to a first target nucleotide sequence within the B2M gene so that the DNA is cleaved at or near the first target nucleotide sequence. In embodiment 352 provided herein is the method of any one of embodiments 328 to 351, wherein the modifying of step (b) comprises contacting DNA of the genome with a second nucleic acid-guided nuclease complexed with a second compatible guide nucleic acid targeted to a second target nucleotide sequence within the TCR subunit gene so that the DNA is cleaved at or near the second target nucleotide sequence. In embodiment 353 provided herein is the method of anyone of embodiments 328 to 352, wherein the modifying of step (c) comprises contacting DNA of the genome with a third nucleic acid-guided nuclease complexed with a third compatible guide nucleic acid targeted to a third target nucleotide sequence within the CIITA subunit gene so that the DNA is cleaved at or near the third target nucleotide sequence.

[0357] In embodiment 354 provided herein is a method of modifying a genome of a human cell comprising (a) modifying a B2M gene in the genome to reduce or eliminate expression of the B2M gene, (b) modifying a T cell receptor (TCR) subunit gene in the genome to reduce or eliminate expression of the subunit, and (c) modifying a CIITA gene in the genome to reduce or eliminate expression of the CIITA gene, wherein at least 2 of (a) to (c) are performed sequentially, not simultaneously, thereby producing a modified human cell.

[0358] In embodiment 355 provided herein is a composition comprising a modified human cell comprising: (a) a first genomic modification comprising a first portion of a first polynucleotide, wherein the first portion comprises a transgene, inserted into a site with a TRC subunit gene, whereby the TRC subunit gene is partially or completely inactivated and the transgene is expressed; and (b) a second genomic modification comprising a second polynucleotide coding for a fusion protein of B2M and HLA-E or HLA-G inserted into a B2M gene, whereby endogenous B2M is partially or completely inactivated and the fusion protein is expressed. In embodiment 356 provided herein is the composition of claim 355, wherein the TRC subunit gene is completely inactivated. In embodiment 357 provided herein is the composition of claim 355 or claim 356, wherein the endogenous B2M gene is completely inactivated. In embodiment 358 provided herein is the composition of claim 355, further comprising: (c) a third genomic modification in a CIITA gene, wherein the CIITA gene is partially or completely inactivated. In embodiment 359 provided herein is the composition of claim 358, wherein the CIITA gene is completely inactivated. In embodiment 360 provided herein is the composition of any one of claims 355-359, wherein the TRC subunit gene comprises a TRAC, TRBC, CD3E, CD3D, CD3G, or CD3Z gene. In embodiment 361 provided herein is the composition of claim 360, wherein the TRC subunit gene comprises a TRAC gene. In embodiment 362 provided herein is the composition of claim 360, wherein the TRC subunit gene comprises a TRBC gene. In embodiment 363 provided herein is the composition of claim 360, wherein the TRC subunit gene comprises a CD3E gene. In embodiment 364 provided herein is the composition of claim 360, wherein the TRC subunit gene comprises a CD3D gene. In embodiment 365 provided herein is the composition of claim 360, wherein the TRC subunit gene comprises a CD3G gene. In embodiment 366 provided herein is the composition of claim 360,
[0359] wherein the TRC subunit gene comprises a CD3Z gene. In embodiment 367 provided herein is the composition of any one of claims 355-366, wherein the transgene comprises a CAR or portion thereof, a cytokine, and/or a reporter gene. In embodiment 368 provided herein is the composition of claim 367, wherein the transgene comprises a CAR or portion thereof.

[0360] In embodiment 369 provided herein is a composition comprising a modified human cell comprising: (a) a first genomic modification comprising a first portion of a polynucleotide, wherein the first portion comprises a transgene, inserted into a site with a TRC subunit gene, whereby the TRC subunit gene is partially or completely inactivated and the transgene is expressed; and (b) a second genomic modification in a CIITA gene, wherein the CIITA gene is partially or completely inactivated. In embodiment 370 provided herein is the composition of claim 369, wherein the TRC subunit gene is completely inactivated. In embodiment 371 provided herein is the composition of claim 369 or claim 356, wherein the CIITA gene is completely inactivated. In embodiment 372 provided herein is the composition of any one of claims 369-371, further comprising: (c) a third genomic modification comprising a polynucleotide coding for a fusion protein of B2M and HLA-E or HLA-G inserted into a B2M gene, whereby endogenous B2M is partially or completely inactivated and the fusion protein is expressed. In embodiment 373 provided herein is the composition of claim 372, wherein endogenous B2M is completely inactivated. In embodiment 374 provided herein is the composition of any one of claims 369-373, wherein the TRC subunit gene comprises a TRAC, TRBC, CD3E, CD3D, CD3G, or CD3Z gene. In embodiment 375 provided herein is the composition of claim 374, wherein the TRC subunit gene comprises a TRAC gene. In embodiment 376 provided herein is the composition of claim 374, wherein the TRC subunit gene comprises a TRBC gene. In embodiment 377 provided herein is the composition of claim 374, wherein the TRC subunit gene comprises a CD3E gene. In embodiment 378 provided herein is the composition of claim 374, wherein the TRC subunit gene comprises a CD3D gene. In embodiment 379 provided herein is the composition of claim 374, wherein the TRC subunit gene comprises a CD3G gene. In embodiment 380 provided herein is the composition of claim 374, wherein the TRC subunit gene comprises a CD3Z gene. In embodiment 381 provided herein is the composition of any one of claims 369-380, wherein the transgene comprises a CAR or portion thereof, a cytokine, and/or a reporter gene. In embodiment 382 provided herein is the composition of claim 381, wherein the transgene comprises a CAR or portion thereof.

[0361] In embodiment 383 provided herein is a composition comprising a modified human cell comprising: (a) a first genomic modification comprising a polynucleotide coding for a fusion protein of B2M and HLA-E or HLA-G inserted into a B2M gene, whereby endogenous B2M is partially or completely inactivated and the fusion protein is expressed; (b) a second genomic modification in a CIITA gene, wherein the CIITA gene is partially or completely inactivated; and (c) a third genomic modification comprising a first portion of a polynucleotide, wherein the first portion comprises a transgene, inserted into a site with a TRC subunit gene, whereby the TRC subunit gene is partially or completely inactivated and the transgene is expressed. In embodiment 384 provided herein is the composition of claim 383, wherein endogenous B2M is completely inactivated. In embodiment 385 provided herein is the composition of claim 383 or claim 384, wherein the CIITA gene is completely inactivated. In embodiment 386 provided herein is the composition of any one of claims 383-385, wherein the TRC subunit gene is completely inactivated. In embodiment 387 provided herein is the composition of any one of claims 383-386, wherein the TRC subunit gene comprises a TRAC, TRBC, CD3E, CD3D, CD3G, or CD3Z gene. In embodiment 388 provided herein is the composition of claim 387, wherein the TRC subunit gene comprises a TRAC gene. In embodiment 389 provided herein is the composition of claim 387, wherein the TRC subunit gene comprises a TRBC gene. In embodiment 390 provided herein is the composition of claim 387, wherein the TRC subunit gene comprises a CD3E gene. In embodiment 391 provided herein is the composition of claim 387, wherein the TRC subunit gene comprises a CD3D gene. In embodiment 392 provided herein is the composition of claim 387, wherein the TRC subunit gene comprises a CD3G gene. In embodiment 393 provided herein is the composition of claim 387, wherein the TRC subunit gene comprises a CD3Z gene. In embodiment 394 provided herein is the composition of any one of claims 383-393, wherein the transgene comprises a CAR or portion thereof, a cytokine, and/or a reporter gene. In embodiment 395 provided herein is the composition of claim 394, wherein the transgene comprises a CAR or portion thereof.

### VIII. EXAMPLES

### A. Example 1

[0362] This example demonstrates successful triple knock out of TCR, HLA-I, and HLA-II with and without CAR insertion into the TRAC locus using multiplexed editing with RNPs comprising either a single gRNA or a gRNA comprising a targeter and a modulator nucleic acid.

[0363] Primary human pan T-cells were isolated from whole leukopaks, processed on the day of receipt, and CD3-positive pan T-cells were separated from other peripheral blood mononuclear cells. Cells were characterized by flow cytometry before and after negative selection for viability, CD3 expression, and CD4/CD8 positivity. Cells were gated for proper size/shape, and singlets were selected. Cells displayed >98% viability prior to and following enrichment for pan T-cells, and the negative selection strategy resulted in enrichment of CD3 positive cells from 76.8% to 97.0%. Additionally, the CD4: CD8 ratio was maintained through the enrichment. The cells were frozen and used as needed. Viability was measured by imaging in a flow cell with a volume of 1.4 μL using the Nucleocounter NC-200 and Vial cassettes after staining cells Acridine orange and DAPI to differentiate live cells (acridine orange positive cells) from dead cells (DAPI positive cells).

[0364] Primary human pan T-cell specific nucleofection conditions, including nucleofection buffer, nucleofection program (EO-115), and IL-2 concentration (200 IU/mL), were obtained from recommendations by Lonza and Nucleofection solution. 8-12% CAR expression for each of the two CARs was observed (FIGS. 3A and B; 2^{nd} and 3^{rd} bars for single (FL gRNA) and dual (STAR) gRNAs respectively). To obtain higher insertion rates, additional optimization on the protocol using nucleofection program EH-115 and increasing the IL-2 concentration to 500 IU in post-nucleofection cell culturing was performed. Furthermore, inclusion of a ssODN in the nucleofection reaction increased delivery of the gene-editing reagents in primary human pan T-cells. Specifically, inclusion of a 200 nt ssODN in the nucleofection solution yielded high viability at day 11 post-nucleofection and CAR expression up to 40% when using 1 μg linearized dsDNA (ldsPLA074). Inclusion of an ssODN in the nucleofection insertion protocol consistently produced a CAR expressing cell population between 40-70% of the total cell population at eleven to twelve days post-nucleofection FIGS. 3A and B; fourth bars). Specifically, FIG. 3A shows editing efficiency for three simultaneously genomic modifications comprising triple knock-out (KO) of HLA-1, HLA-2, and TCR as measured by flow cytometry following three treatment conditions: (1) untreated control; (2) treatment with gRNAs comprising a single polynucleotide (FL gRNA) in the presence of linear double stranded DNA (ldsPLA074); (3) treatment with gRNAs comprising a dual guide RNA (STAR) in the presence of linear double stranded DNA; and (4) treatment with gRNAs comprising a dual guide RNA (STAR) in the presence of linear double stranded DNA using improved conditions as described above. Specifically, FIG. 3B shows editing efficiency for three simultaneously genomic modifications comprising triple knock-out (KO) of HLA-1, HLA-2, and TCR as well as insertion of a polynucleotide encoding for a CAR polypeptide as measured as measured by flow cytometry following three treatment conditions: (1) untreated control; (2) treatment with gRNAs comprising a single polynucleotide (FL gRNA) in the presence of linear double stranded DNA (ldsPLA074); (3) treatment with gRNAs comprising a dual guide RNA (STAR) in the presence of linear double stranded DNA; and (4) treatment with gRNAs comprising a dual guide RNA (STAR) in the presence of linear double stranded DNA using improved conditions as described above.

### B. Example 2

[0365] This example demonstrates reduction of surface-expressed TCR through knockout of CD3D.

[0366] Primary human pan T-cells were transfected 100pmol RNPs complexed with either gCD3D_001 (spacer sequence listed as SEQ ID NO: 655), gCD3D_002 (spacer sequence listed as SEQ ID NO: 656), gCD3D_003 (spacer sequence listed as SEQ ID NO: 657), gCD3D_004 (spacer sequence listed as SEQ ID NO: 658), gCD3D_005 (spacer sequence listed as SEQ ID NO: 659), gCD3D_006 (spacer sequence listed as SEQ ID NO: 660), gCD3D_007 (spacer sequence listed as SEQ ID NO: 661), gCD3D_008 (spacer sequence listed as SEQ ID NO: 662), gCD3D_009 (spacer sequence listed as SEQ ID NO: 663), gCD3D_010 (spacer sequence listed as SEQ ID NO: 664), gB2M30 (spacer sequence listed as SEQ ID NO: 2012), gCIITA_80 (spacer sequence listed as SEQ ID NO: 2018), gTRAC043 (spacer sequence listed as SEQ ID NO: 1996), or no guide RNA in Nucleofection buffer P3 using nucleofection program EH-115. After transfection, the cells were stained with anti-HLAI, anti-HLAII, and and -TCR antibodies and analyzed by flow cytometry. (FIG. 4). Specifically, FIG. 4 shows percent of negative cells after treatment (y-axis) for each tested gNA for each antibody stain (HLA-I, black; HLA-II dark gray, TCR-light gray).

### C. Example 3

[0367] This example demonstrates reduction of surface-expressed TCR through knockout of CD247 and/or CD3G.

[0368] Primary human pan T-cells were transfected 100pmol RNPs complexed with either gCD247_001 (spacer sequence listed as SEQ ID NO: 688), gCD247_002 (spacer sequence listed as SEQ ID NO: 689), gCD247_004 (spacer sequence listed as SEQ ID NO: 691), gCD247_005 (spacer sequence listed as SEQ ID NO: 692), gCD247_007 (spacer sequence listed as SEQ ID NO: 694), gCD247_011 (spacer sequence listed as SEQ ID NO: 698), gCD247_012 (spacer sequence listed as SEQ ID NO: 699), gCD247_013 (spacer sequence listed as SEQ ID NO: 700), gCD247_015 (spacer sequence listed as SEQ ID NO: 702), gCD247_016 (spacer sequence listed as SEQ ID NO: 703), gCD3G_001 (spacer sequence listed as SEQ ID NO: 665), gCD3G_004 (spacer sequence listed as SEQ ID NO: 668), gCD3G_006 (spacer sequence listed as SEQ ID NO: 670), gCD3G_007 (spacer sequence listed as SEQ ID NO: 671), gCD3G_008 (spacer sequence listed as SEQ ID NO: 672), gCD3G_011 (spacer sequence listed as SEQ ID NO: 675), gCD3G_012 (spacer sequence listed as SEQ ID NO: 676), gCD3G_017 (spacer sequence listed as SEQ ID NO: 681), gCD3G_022 (spacer sequence listed as SEQ ID NO: 686), gCD3G_023 (spacer sequence listed as SEQ ID NO: 687), gTRAC043 (spacer sequence listed as SEQ ID NO: 1996), or no guide RNA in Nucleofection buffer P3 using nucleofection program EH-115. Reduced TCR surface expression was observed with gCD247_001, gCD247_002, gCD247_004, gCD247_016, gCD3G_001 and gCD247_023 (FIG. 5). Specifically, FIG. 5 shows percent of negative cells after treatment (y-axis) for each tested gNA for each antibody stain (HLA-I, black; HLA-II dark gray, TCR-light gray).

### D. Example 4

[0369] This example demonstrates success knockout of TCR with or without simultaneous knock in of a CAAR polypeptide.

[0370] Primary human pan T-cells were transfected 100pmol RNPs complexed with either gTRBC1_2_003 (spacer sequence listed as SEQ ID NO: 2000) or no guide RNA in Nucleofection buffer P3 using nucleofection program EH-115. For knock in experiments, cells were simultaneously transfected with ART-21-101 miniplasmid comprising the CAAR. FIG. 6 demonstrates editing efficiency for TRBC without and with KI of a polynucleotide encoding for a CAAR polypeptide as measured by flow cytometry (anti-TCR, anti-CAAR staining): (column 1) untreated control; (column 2) treatment with gRNA without the presence of polypeptide comprising a nuclease, (column 3) treatment with gRNA and a CRISPR nuclease (RNPs), (column 4) a linearized polynucleotide, (column 5) a linearized polynucleotide encoding a CAAR polypeptide and RNPs, (column 6) a circular polynucleotide, and (column 7) a circular polynucleotide encoding a CAAR polypeptide and RNPs. Substantial TCR KO (y-axis) was observed in the samples when the RNPs were present (columns 3 (RNP only), 5 (ldsPLA101 only), and 7 (ART-210191+RNPs)) (FIG. 6A). CAAR expression (y-axis) was observed in the cells that were transfected with the RNPs and the linearized or circular polynucleotide encoding the CAAR polypeptide (5 (ldsPLA101 only) and 7 (ART-210191+RNPs)) (FIG. 6B).

ART-21-101 miniplasmid sequence:
(SEQ ID NO: 2048)
CGCGCACCCACACCCAGGCCAGGGTGTTGTC
CGGCACCACCTGGTCCTGGACCGCGCTGATGAACAGGGTCACGTCGTCCCGGACCACACCGGCGA
AGTCGTCCTCCACGAAGTCCCGGGAGAACCCGAGCCGGTCGGTCCAGAACTCGACCGCTCCGGCG
ACGTCGCGCGCGGTGAGCACCGGAACGGCACTGGTCAACTTGGCCATACTCTTCCTTTTTCAATA
TTATTGAAGCATTTATCAGGGTTATTGTCTCATGAGCGGATACATAACGCGTTTAGAGTCTCTCA
GCTGGTACACGAAGCTTAATGCCAACATACCATAAACCTCCCATTCTGCTAATGCCCAGCCTAAG
TTGGGGAGACCACTCCAGATTCCAAGATGTACAGTTTGCTTTGCTGGGCCTTTTTCCCATGCCTG
CCTTTACTCTGCCAGAGTTATATTGCTGGGGTTTTGAAGAAGATCCTATTAAATAAAAGAATAAG
CAGTATTATTAAGTAGCCCTGCATTTCAGGTTTCCTTGAGTGGCAGGCCAGGCCTGGCCGTGAAC
GTTCACTGAAATCATGGCCTCTTGGCCAAGATTGATAGCTTGTGCCTGTCCCTGAGTCCCAGTCC
ATCACGAGCAGCTGGTTTCTAAGATGCTATTTCCCGTATAAAGCATGAGACCGTGACTTGCCAGC
CCCACAGAGCCCCGCCCTTGTCCATCACTGGCATCTGGACTCCAGCCTGGGTTGGGGCAAAGAGG
GAAATGAGATCATGTCCTAACCCTGATCCTCTTGTCCCACAGATATCCAGAACCCTGACCCTGCC
GTGGGCAGCGGCGCTACTAACTTCAGCCTGCTGAAGCAGGCTGGCGACGTGGAGGAGAACCCTGG
ACCTATGCTGCTGCTGGTGACATCCCTGCTGCTGTGCGAACTGCCTCATCCCGCTTTCCTGCTGA
TTCCTGAAGTCCAGCTGGTCGAGAGCGGAGGAGGACTGGTGCAGCCTGGAGGATCACTGAGACTG
AGCTGCGCCGCTTCCGGATTCACCTTTAGCTCCTTCGGCATGCACTGGGTGAGGCAGGCACCAGG
AAAAGGCCTGGAGTGGGTCGCTTACATCTCTAGTGACTCAAGCGCCATCTACTATGCAGATACCG
TGAAAGGCAGGTTTACAATCAGTCGCGACAACGCTAAGAATTCCCTGTATCTGCAGATGAACTCT
CTGCGCGACGAGGATACAGCAGTCTACTATTGCGGGGGGGGAAGAGAAAATATCTACTATGGAAG
CCGACTGGACTACTGGGGACAGGGAACCACAGTGACAGTCTCCTCTGGAGGAGGAGGAAGCGGAG
GAGGAGGATCCGGAGGAGGCGGGTCTGATATCCAGCTGACTCAGAGCCCCTCCTTCCTGTCTGCC
AGTGTGGGCGACAGGGTCACTATTACCTGTAAGGCATCCCAGAACGTGGATACCAATGTCGCCTG
GTACCAGCAGAAGCCCGGGAAAGCACCTAAGGCCCTGATCTATTCAGCCAGCTACCGATATTCTG
GCGTGCCAAGTCGGTTCTCCGGATCTGGCAGTGGGACTGACTTTACACTGACTATTAGTTCACTG
CAGCCCGAAGATTTTGCTACCTACTATTGTCAGCAGTACAATAACTACCCATTCACCTTCGGACA
GGGGACAAAACTGGAAATCAAAGAAAGCAAGTACGGACCGCCCTGCCCCCCTTGCCCTGGCCAGC
CTAGAGAACCCCAGGTGTACACCCTGCCTCCCAGCCAGGAAGAGATGACCAAGAACCAGGTGTCC
CTGACCTGCCTGGTCAAAGGCTTCTACCCCAGCGATATCGCCGTGGAATGGGAGAGCAACGGCCA
GCCCGAGAACAACTACAAGACCACCCCCCCTGTGCTGGACAGCGACGGCAGCTTCTTCCTGTACT
CCCGGCTGACCGTGGACAAGAGCCGGTGGCAGGAAGGCAACGTCTTCAGCTGCAGCGTGATGCAC
GAGGCCCTGCACAACCACTACACCCAGAAGTCCCTGAGCCTGAGCCTGGGCAAGATGTTCTGGGT
GCTGGTGGTGGTCGGAGGCGTGCTGGCCTGCTACAGCCTGCTGGTCACCGTGGCCTTCATCATCT
TTTGGGTGAAACGGGGCAGAAAGAAACTCCTGTATATATTCAAACAACCATTTATGAGACCAGTA
CAAACTACTCAAGAGGAAGATGGCTGTAGCTGCCGATTTCCAGAAGAAGAAGAAGGAGGATGTGA
ACTGCGGGTGAAGTTCAGCAGAAGCGCCGACGCCCCTGCCTACCAGCAGGGCCAGAATCAGCTGT
ACAACGAGCTGAACCTGGGCAGAAGGGAAGAGTACGACGTCCTGGATAAGCGGAGAGGCCGGGAC
CCTGAGATGGGCGGCAAGCCTCGGCGGAAGAACCCCCAGGAAGGCCTGTATAACGAACTGCAGAA
AGACAAGATGGCCGAGGCCTACAGCGAGATCGGCATGAAGGGCGAGCGGAGGCGGGGCAAGGGCC
ACGACGGCCTGTATCAGGGCCTGTCCACCGCCACCAAGGATACCTACGACGCCCTGCACATGCAG
GCCCTGCCCCCAAGGGCTAGCGGCAGTGGAGAGGGCAGAGGAAGTCTGCTAACATGCGGTGACGT
CGAGGAGAATCCTGGCCCAATGGAAGATTTTAACATGGAGAGTGACAGCTTTGAAGATTTCTGGA
AAGGTGAAGATCTTAGTAATTACAGTTACAGCTCTACCCTGCCCCCTTTTCTACTAGATGCCGCC
CCATGTGAACCAGAATCCCTGGAAATCAACAAGTATTTTGTGGTCATTATCTATGCCCTGGTATT
CCTGCTGAGCCTGCTGGGAAACTCCCTCGTGATGCTGGTCATCTTATACAGCAGGGTCGGCCGCT
CCGTCACTGATGTCTACCTGCTGAACCTAGCCTTGGCCGACCTACTCTTTGCCCTGACCTTGCCC
ATCTGGGCCGCCTCCAAGGTGAATGGCTGGATTTTTGGCACATTCCTGTGCAAGGTGGTCTCACT
CCTGAAGGAAGTCAACTTCTATAGTGGCATCCTGCTACTGGCCTGCATCAGTGTGGACCGTTACC
TGGCCATTGTCCATGCCACACGCACACTGACCCAGAAGCGCTACTTGGTCAAATTCATATGTCTC
AGCATCTGGGGTCTGTCCTTGCTCCTGGCCCTGCCTGTCTTACTTTTCCGAAGGACCGTCTACTC
ATCCAATGTTAGCCCAGCCTGCTATGAGGACATGGGCAACAATACAGCAAACTGGCGGATGCTGT
TACGGATCCTGCCCCAGTCCTTTGGCTTCATCGTGCCACTGCTGATCATGCTGTTCTGCTACGGA
TTCACCCTGCGTACGCTGTTTAAGGCCCACATGGGGCAGAAGCACCGGGCCATGCGGGTCATCTT
TGCTGTCGTCCTCATCTTCCTGCTCTGCTGGCTGCCCTACAACCTGGTCCTGCTGGCAGACACCC
TCATGAGGACCCAGGTGATCCAGGAGACCTGTGAGCGCCGCAATCACATCGACCGGGCTCTGGAT
GCCACCGAGATTCTGGGCATCCTTCACAGCTGCCTCAACCCCCTCATCTACGCCTTCATTGGCCA
GAAGTTTCGCCATGGACTCCTCAAGATTCTAGCTATACATGGCTTGATCAGCAAGGACTCCCTGC
CCAAAGACAGCAGGCCTTCCTTTGTTGGCTCTTCTTCAGGGCACACTTCCACTACTCTCTAACTG
TGCCTTCTAGTTGCCAGCCATCTGTTGTTTGCCCCTCCCCCGTGCCTTCCTTGACCCTGGAAGGT
GCCACTCCCACTGTCCTTTCCTAATAAAATGAGGAAATTGCATCGCATTGTCTGAGTAGGTGTCA
TTCTATTCTGGGGGGTGGGGTGGGGCAGGACAGCAAGGGGGAGGATTGGGAAGACAATAGCAGGC
ATGCTGGGGATACCAGCTGAGAGACTCTAATTCCAGTGACAAGTCTGTCTGCCTATTCACCGATT
TTGATTCTCAAACAAATGTGTCACAAAGTAAGGATTCTGATGTGTATATCACAGACAAAACTGTG
CTAGACATGAGGTCTATGGACTTCAAGAGCAACAGTGCTGTGGCCTGGAGCAACAAATCTGACTT
TGCATGTGCAAACGCCTTCAACAACAGCATTATTCCAGAAGACACCTTCTTCCCCAGCCCAGGTA
AGGGCAGCTTTGGTGCCTTCGCAGGCTGTTTCCTTGCTTCAGGAATGGCCAGGTTCTGCCCAGAG
CTCTGGTCAATGATGTCTAAAACTCCTCTGATTGGTGGTCTCGGCCTTATCCATTGCCACCAAAA
CCCTCTTTTTACTAAGAAACAGTGAGCCTTGTTCTGGCAGTCCAGAGAATGACACGGGAAAAAAG
CAGATGAAGAGAAGGTGGCAGGAGAAAGCTTCGTGTACCAGCTGAGAGACTCTAAATCGACTCTA
GAGGATCCCGGGTACCGAGCTCGAATTCGGATATCCTCGAGACTAGTGGGCCCGTTTAAACACAT
GTGTTTTTCCATAGGCTCCGCCCCCCTGACGAGCATCACAAAAATCGACGCTCAAGTCAGAGGTG
GCGAAACCCGACAGGACTATAAAGATACCAGGCGTTTCCCCCTGGAAGCTCCCTCGTGCGCTCTC
CTGTTCCGACCCTGCCGCTTACCGGATACCTGTCCGCCTTTCTCCCTTCGGGAAGCGTGGCGCTT
TCTCATAGCTCACGCTGTAGGTATCTCAGTTCGGTGTAGGTCGTTCGCTCCAAGCTGGGCTGTGT
GCACGAACCCCCCGTTCAGCCCGACCGCTGCGCCTTATCCGGTAACTATCGTCTTGAGTCCAACC
CGGTAAGACACGACTTATCGCCACTGGCAGCAGCCACTGGTAACAGGATTAGCAGAGCGAGGTAT
GTAGGCGGTGCTACAGAGTTCTTGAAGTGGTGGCCTAACTACGGCTACACTAGAAGGACAGTATT
TGGTATCTGCGCTCTGCTGAAGCCAGTTACCTTCGGAAAAAGAGTTGGTAGCTCTTGATCCGGCA
AACAAACCACCGCTGGTAGCGGTGGTTTTTTTGTTTGCAAGCAGCAGATTACGCGCAGAAAAAAA
GGATCTCAAGAAGATCCTTTGATCTTTTCTACGTCAGTCCTGCTCCTCGGCCACGAAGTGCACGC
AGTTGCCGGCCGGGTCGCGCAGGGCGAACTCCCGCCCCCACGGCTGCTCGCCGATCTCGGTCATG
GCCGGCCCGGAGGCGTCCCGGAAGTTCGTGGACACGACCTCCGACCACTCGGCGTACAGCTCGTC
CAGGC
ldsPLA101 sequence:
(SEQ ID NO: 2049)
ATTGGGATCCTCAGCAAAGGAAAATTATAATTAGAAAAAGTC
AATTTAGTTATTGTAATTATACCACTAATGAGAGTTTCCTACCTCGAGTTTCAGGATTACATAGC
CATGCACCAAGCAAGGCTTTGAAAAATAAAGATACACAGATAAATTATTTGGATAGATGATCAGA
CAAGCCTCAGTAAAAACAGCCAAGACAATCAGGATATAATGTGACCATAGGAAGCTGGGGAGACA
GTAGGCAATGTGCATCCATGGGACAGCATAGAAAGGAGGGGCAAAGTGGAGAGAGAGCAACAGAC
ACTGGGATGGTGACCCCAAAACAATGAGGGCCTAGAATGACATAGTTGTGCTTCATTACGGCCCA
TTCCCAGGGCTCTCTCTCACACACACAGAGCCCCTACCAGAACCAGACAGCTCTCAGAGCAACCC
TGGCTCCAACCCCTCTTCCCTTTCCAGAGGACCTGAACAAGGTGTTCCCACCCGAGGTCGCTGTG
TTTGAGCCATCAGAAGCACGTGAGGCTCCGGTGCCCGTCAGTGGGCAGAGCGCACATCGCCCACA
GTCCCCGAGAAGTTGGGGGGAGGGGTCGGCAATTGAACCGGTGCCTAGAGAAGGTGGCGCGGGGT
AAACTGGGAAAGTGATGTCGTGTACTGGCTCCGCCTTTTTCCCGAGGGTGGGGGAGAACCGTATA
TAAGTGCAGTAGTCGCCGTGAACGTTCTTTTTCGCAACGGGTTTGCCGCCAGAACACAGGTAAGT
GCCGTGTGTGGTTCCCGCGGGCCTGGCCTCTTTACGGGTTATGGCCCTTGCGTGCCTTGAATTAC
TTCCACCTGGCTGCAGTACGTGATTCTTGATCCCGAGCTTCGGGTTGGAAGTGGGTGGGAGAGTT
CGAGGCCTTGCGCTTAAGGAGCCCCTTCGCCTCGTGCTTGAGTTGAGGCCTGGCCTGGGCGCTGG
GGCCGCCGCGTGCGAATCTGGTGGCACCTTCGCGCCTGTCTCGCTGCTTTCGATAAGTCTCTAGC
CATTTAAAATTTTTGATGACCTGCTGCGACGCTTTTTTTCTGGCAAGATAGTCTTGTAAATGCGG
GCCAAGATCTGCACACTGGTATTTCGGTTTTTGGGGCCGCGGGCGGCGACGGGGCCCGTGCGTCC
CAGCGCACATGTTCGGCGAGGCGGGGCCTGCGAGCGCGGCCACCGAGAATCGGACGGGGGTAGTC
TCAAGCTGGCCGGCCTGCTCTGGTGCCTGGCCTCGCGCCGCCGTGTATCGCCCCGCCCTGGGCGG
CAAGGCTGGCCCGGTCGGCACCAGTTGCGTGAGCGGAAAGATGGCCGCTTCCCGGCCCTGCTGCA
GGGAGCTCAAAATGGAGGACGCGGCGCTCGGGAGAGCGGGCGGGTGAGTCACCCACACAAAGGAA
AAGGGCCTTTCCGTCCTCAGCCGTCGCTTCATGTGACTCCACTGAGTACCGGGCGCCGTCCAGGC
ACCTCGATTAGTTCTCGTGCTTTTGGAGTACGTCGTCTTTAGGTTGGGGGGAGGGGTTTTATGCG
ATGGAGTTTCCCCACACTGAGTGGGTGGAGACTGAAGTTAGGCCAGCTTGGCACTTGATGTAATT
CTCCTTGGAATTTGCCCTTTTTGAGTTTGGATCTTGGTTCATTCTCAAGCCTCAGACAGTGGTTC
AAAGTTTTTTTCTTCCATTTCAGGTGTCGTGAGCTAGAGCCACCATGGAGTTTGGGCTGAGCTGG
CTTTTTCTTGTGGCTATTTTAAAAGGTGTCCAGTGCGGATCCGAGCTGCGGATCGAGACAAAGGG
CCAGTACGACGAGGAAGAGATGACAATGCAGCAGGCCAAGCGGCGGCAGAAACGCGAGTGGGTCA
AGTTCGCCAAGCCCTGCAGAGAGGGCGAGGACAACAGCAAGCGGAACCCTATCGCCAAGATCACC
AGCGACTACCAGGCCACCCAGAAGATCACCTACCGGATCAGCGGCGTGGGCATCGACCAGCCCCC
TTTCGGCATCTTCGTGGTGGACAAGAACACCGGCGACATCAACATCACCGCCATCGTGGACAGAG
AGGAAACCCCCAGCTTCCTGATCACCTGTCGGGCCCTGAATGCCCAGGGCCTGGACGTGGAAAAG
CCCCTGATCCTGACCGTGAAGATCCTGGACATCAACGACAACCCCCCCGTGTTCAGCCAGCAGAT
CTTCATGGGCGAGATCGAGGAAAACAGCGCCAGCAACAGCCTCGTGATGATCCTGAACGCCACCG
ACGCCGACGAGCCCAACCACCTGAATAGCAAGATCGCCTTCAAGATCGTGTCCCAGGAACCCGCC
GGAACCCCCATGTTCCTGCTGAGCAGAAATACCGGCGAAGTGCGGACCCTGACCAACAGCCTGGA
TAGAGAGCAGGCCAGCAGCTACCGGCTGGTGGTGTCTGGCGCTGACAAGGATGGCGAGGGCCTGA
GCACACAGTGCGAGTGCAACATCAAAGTGAAGGACGTGAACGACAACTTCCCTATGTTCCGGGAC
AGCCAGTACAGCGCCCGGATCGAAGAGAACATCCTGAGCAGCGAGCTGCTGCGGTTCCAAGTGAC
CGACCTGGACGAAGAGTACACCGACAACTGGCTGGCCGTGTACTTCTTCACCAGCGGCAACGAGG
GCAATTGGTTCGAGATCCAGACCGACCCCCGGACCAATGAGGGCATCCTGAAGGTCGTGAAGGCC
CTGGACTACGAGCAGCTGCAGAGCGTGAAGCTGTCTATCGCCGTGAAGAACAAGGCCGAGTTCCA
CCAGTCCGTGATCAGCCGGTACAGAGTGCAGAGCACCCCCGTGACCATCCAAGTGATCAACGTGC
GCGAGGGCATTGCCTTCGCTAGCGGTGGCGGAGGTTCTGGAGGTGGAGGTTCCTCCGGAATCTAC
ATCTGGGCGCCCTTGGCCGGGACTTGTGGGGTCCTTCTCCTGTCACTGGTTATCACCCTTTACTG
CAAACGGGGCAGAAAGAAACTCCTGTATATATTCAAACAACCATTTATGAGACCAGTACAAACTA
CTCAAGAGGAAGATGGCTGTAGCTGCCGATTTCCAGAAGAAGAAGAAGGAGGATGTGAACTGAGA
GTGAAGTTCAGCAGGAGCGCAGACGCCCCCGCGTACCAGCAGGGCCAGAACCAGCTCTATAACGA
GCTCAATCTAGGACGAAGAGAGGAGTACGATGTTTTGGACAAGAGACGTGGCCGGGACCCTGAGA
TGGGGGGAAAGCCGAGAAGGAAGAACCCTCAGGAAGGCCTGTACAATGAACTGCAGAAAGATAAG
ATGGCGGAGGCCTACAGTGAGATTGGGATGAAAGGCGAGCGCCGGAGGGGCAAGGGGCACGATGG
CCTTTACCAGGGTCTCAGTACAGCCACCAAGGACACCTACGACGCCCTTCACATGCAGGCCCTGC
CCCCTCGCTAAGTCGACAATCAACCTCTGGATTACAAAATTTGTGAAAGATTGACTGGTATTCTT
AACTATGTTGCTCCTTTTACGCTATGTGGATACGCTGCTTTAATGCCTTTGTATCATGCTATTGC
TTCCCGTATGGCTTTCATTTTCTCCTCCTTGTATAAATCCTGGTTGCTGTCTCTTTATGAGGAGT
TGTGGCCCGTTGTCAGGCAACGTGGCGTGGTGTGCACTGTGTTTGCTGACGCAACCCCCACTGGT
TGGGGCATTGCCACCACCTGTCAGCTCCTTTCCGGGACTTTCGCTTTCCCCCTCCCTATTGCCAC
GGCGGAACTCATCGCCGCCTGCCTTGCCCGCTGCTGGACAGGGGCTCGGCTGTTGGGCACTGACA
ATTCCGTGGTGTTGTCGGGGAAGCTGACGTCCTTTCCTTGGCTGCTCGCCTGTGTTGCCACCTGG
ATTCTGCGCGGGACGTCCTTCTGCTACGTCCCTTCGGCCCTCAATCCAGCGGACCTTCCTTCCCG
CGGCCTGCTGCCGGCTCTGCGGCCTCTTCCGCGTCTTCGCCTTCGCCCTCAGACGAGTCGGATCT
CCCTTTGGGCCGCCTCCCCGCCTGCGACTGTGCCTTCTAGTTGCCAGCCATCTGTTGTTTGCCCC
TCCCCCGTGCCTTCCTTGACCCTGGAAGGTGCCACTCCCACTGTCCTTTCCTAATAAAATGAGGA
AATTGCATCGCATTGTCTGAGTAGGTGTCATTCTATTCTGGGGGGTGGGGGGGGCAGGACAGCA
AGGGGGAGGATTGGGAAGACAATAGCAGGCATGCTGGGGATGCGGTGGGCTCTATGGGAGATCTC
CCACACCCAAAAGGCCACACTGGTGTGCCTGGCCACAGGCTTCTTCCCTGACCACGTGGAGCTGA
GCTGGTGGGTGAATGGGAAGGAGGTGCACAGTGGGGTCAGCACGGACCCGCAGCCCCTCAAGGAG
CAGCCCGCCCTCAATGACTCCAGATACTGCCTGAGCAGCCGCCTGAGGGTCTCGGCCACCTTCTG
GCAGAACCCCCGCAACCACTTCCGCTGTCAAGTCCAGTTCTACGGGCTCTCGGAGAATGACGAGT
GGACCCAGGATAGGGCCAAACCCGTCACCCAGATCGTCAGCGCCGAGGCCTGGGGTAGAGCAGGT
GAGTGGGGCCTGGGGAGATGCCTGGAGGAGATTAGGTGAGACCAGCTACCAGGGAAAATGGAAAG
ATCCAGGTAGCAGACAAGACTAGATCCAAAAAGAAAGGAACCAGCGCACACCATGAAGGAGAATT
GGGCACCTGTGGTTCATTCTTCTCCCAGATTCTCAGC

### E. Example 5

[0371] This example demonstrates reduction of surface-expressed TCR through knockout of CD3E with or without simultaneous knock in of a CAR.

[0372] Primary human pan T-cells were transfected 100pmol RNPs complexed with either gCD3E_24 (spacer sequence listed as SEQ ID NO: 2001), gCD3E_34 (spacer sequence listed as SEQ ID NO: 2002), gTRAC043 (spacer sequence listed as SEQ ID NO: 1996), or no guide RNA in Nucleofection buffer P3 using nucleofection program EH-115. For knock in studies, the cells were cotransfected with one of the following repair templates: CD3E_24 P2A miniplasmid, CD3E_24 CAG miniplasmid, CD3E_34 CAG miniplasmid, PLA074-TRAC043 P2A miniplasmid. FIG. 7 demonstrates editing efficiency for CD3E without and with KI of a polynucleotide encoding for a CAR polypeptide as measured by flow cytometry (anti-TCR, anti-CAR staining): (column 1) No program (NP) control, (column 2) no cargo (NC) control, (column 3) treatment with gCD3E_24 RNPs and a circular CD3E_24 P2A miniplasmid repair template, (column 4) treatment with gCD3E_24 RNPs and a circular CD3E_24 CAG miniplasmid repair template, (column 5) treatment with gCD3E_34 RNPs and a circular CD3E_34 CAG miniplasmid, and (column 6) treatment with gTRAC043 RNPs (spacer sequence listed as SEQ ID NO: 1996) and a circular PLA074-TRAC043 P2A miniplasmid repair template (positive control). Substantial TCR KO (y-axis) was observed in the samples when the RNPs were present (columns 3-5) (FIG. 7A). CAR expression (y-axis) was observed in the cells that were transfected with the RNPs and the circular polynucleotide encoding the CAR polypeptide (columns 3-5) (FIG. 7B).

CD3E_24 P2A miniplasmid sequence:
(SEQ ID NO: 2050)
CGCGCACCCACACCCAGGCCAGGGTGTTGTC
CGGCACCACCTGGTCCTGGACCGCGCTGATGAACAGGGTCACGTCGTCCCGGACCACACCGGCGA
AGTCGTCCTCCACGAAGTCCCGGGAGAACCCGAGCCGGTCGGTCCAGAACTCGACCGCTCCGGCG
ACGTCGCGCGCGGTGAGCACCGGAACGGCACTGGTCAACTTGGCCATACTCTTCCTTTTCAATAT
TATTGAAGCATTTATCAGGGTTATTGTCTCATGAGCGGATACATAACGCGTGCCCTCAGTATCCT
GGATCTGAAAATTGGGATCCTCAGCAGACACGTGAGTTTATTGGTCTTTTATTTATGCCCTGTCT
GAGGATGCAGATTGGTGGGTAGATGAGAAGGAACTGATTGAGAGAGATTAACCCCAAGAACTGAT
ATCTTCCCAGCATTGCATTCTCAACTCCATTTTAGAAAGGTTCCAAATAGGGACTTCTGTGGGTT
TTTCTTTACATCCATCTTACCCTTCCCAAGTCCCCATGTCCCTGCGTAAACCCTAAAGCCACCTC
TCAAaaggttctctagttcccttcaaggttctctagttcccttcaTTCCACATATCTCCTCTTCC
ACACCCTCTAGCCAGTAGAGCTCCCTTCTGACAAGCAAGTCTAAGATCTAGATGACAGATGACTT
CCTGCATTTGGGTGGTTCTTTTGTCACTAATTTGCCTTTTCTAAAATTGTCCTGGTTTCTTCTGC
CAATTTCCCTTCTTTCTCCCCAGCATATAAAGTCTCCATCTCTGGAACCACAGTAATATTGACAT
GCCCTGGCAGCGGCGCTACTAACTTCAGCCTGCTGAAGCAGGCTGGCGACGTGGAGGAGAACCCT
GGACCTATGGCTCTCCCAGTGACTGCCCTACTGCTTCCCCTAGCGCTTCTCCTGCATGCAGAGGT
GAAGCTGCAGCAGTCTGGGGCTGAGCTGGTGAGGCCTGGGTCCTCAGTGAAGATTTCCTGCAAGG
CTTCTGGCTATGCATTCAGTAGCTACTGGATGAACTGGGTGAAGCAGAGGCCTGGACAGGGTCTT
GAGTGGATTGGACAGATTTATCCTGGAGATGGTGATACTAACTACAATGGAAAGTTCAAGGGTCA
AGCCACACTGACTGCAGACAAATCCTCCAGCACAGCCTACATGCAGCTCAGCGGCCTAACATCTG
AGGACTCTGCGGTCTATTTCTGTGCAAGAAAGACCATTAGTTCGGTAGTAGATTTCTACTTTGAC
TACTGGGGCCAAGGGACCACGGTCACCGTCTCCTCAGGTGGAGGTGGATCAGGaGGtGGaGGtTC
TGGTGGAGGaGGATCTGACATTGAGCTCACCCAGTCTCCAAAATTCATGTCCACATCAGTAGGAG
ACAGGGTCAGCGTCACCTGCAAGGCCAGTCAGAATGTGGGTACTAATGTAGCCTGGTATCAACAG
AAACCAGGACAATCTCCTAAACCACTGATTTACTCGGCAACCTACCGGAACAGTGGAGTCCCTGA
TCGCTTCACAGGCAGTGGATCTGGGACAGATTTCACTCTCACCATCACTAACGTGCAGTCTAAAG
ACTTGGCAGACTATTTCTGTCAACAATATAACAGGTATCCGTACACGTCCGGAGGGGGGACCAAG
CTGGAGATCAAACGGGCGGCCGCAATTGAAGTTATGTATCCTCCTACTTACCTAGACAATGAGAA
GAGCAATGGAACCATTATCCATGTGAAAGGGAAACACCTTTGTCCAAGTCCCCTATTTCCCGGAC
CTTCTAAGCCCTTTTGGGTGCTGGTGGTGGTTGGTGGAGTCCTGGCTTGCTATAGCTTGCTAGTA
ACAGTGGCCTTTATTATTTTCTGGGTGAGGAGTAAGAGGAGCAGGCTCCTGCACAGTGACTACAT
GAACATGACTCCtCGCCGCCCCGGGCCtACaCGcAAGCATTACCAGCCCTATGCCCCACCACGCG
ACTTCGCAGCCTATCGCTCCAGAGTGAAGTTCAGCAGGAGCGCAGAGCCCCCCGCGTACCAGCAG
GGCCAGAACCAGCTCTATAACGAGCTCAATCTAGGACGAAGAGAGGAGTACGATGTTTTGGACAA
GAGACGTGGCCGGGACCCTGAGATGGGGGGAAAGCCGAGAAGGAAGAACCCTCAGGAAGGCCTGT
ACAATGAACTGCAGAAAGATAAGATGGCGGAGGCCTACAGTGAGATTGGGATGAAAGGCGAGCGC
CGGAGGGGCAAGGGGCACGATGGCCTTTACCAGGGTCTCAGTACAGCCACCAAGGACACCTACGA
CGCCCTTCACATGCAGGCCCTGCCCCCTCGCTAACGACTGTGCCTTCTAGTTGCCAGCCATCTGT
TGTTTGCCCCTCCCCCGTGCCTTCCTTGACCCTGGAAGGTGCCACTCCCACTGTCCTTTCCTAAT
AAAATGAGGAAATTGCATCGCATTGTCTGAGTAGGTGTCATTCTATTCTGGGGGGTGGGGTGGGG
CAGGACAGCAAGGGGGAGGATTGGGAAGACAATAGCAGGCATGCTGGGGATGCGGTGGGCTCTAT
GGCAGTATCCTGGATCTGAAATACTATGGCAACACAatgataaaaacataggcggtgatgaggat
gataaaaacataggcagtgatgaggatCACCTGTCACTGAAGGAATTTTCAGAATTGGAGCAAAG
TGGTTATTATGTCTGCTACCCCAGAGGAAGCAAACCAGAAGATGCGAACTTTTATCTCTACCTGA
GGGCAAGAGGTAATCCAGGTCTCCAGAACAGGTACCACCGGCTCTTTAGGGAGGACCATTCAAAA
GGGCATTCTCAGTGATTTTCCCTAACCCAGCTCACAGTGCCCAGGCGTCTTTGCGCTTCCTCCCA
CACTCAATCCTGGGACTCTCTGGTACCACACGGCATCAGTGTTTTCTGGAATATAGATTAAACAC
CAATATGAGGCTTCTGGGTAACCCCAGTCTGTGCGAGATCTAAAATAGCAACTCCCTAAGAGACA
GGACTGGGTCATTTGCACCGCATCACACCCAGGTTCATAGCACACCAGCGGCCGCTTTCAGATCC
AGGATACTGAGGGCATGTTTTTCCATAGGCTCCGCCaCCCTGACGAGCATCACAAAAATCGACGC
TCAAGTCAGAGGTGGCGAAACCCGACAGGACTATAAAGATACCAGGCGTTTCCCCCTGGACGCTC
CCTCGTGCGCTCTCCTGTTCCGACCCTGCCGCTTACCGGATACCTGTCCGCCTTTCTCCCTTCGG
GAAGCGTGGCGCTTTCTCATAGCTCACGCTGTAGGTATCTCAGTTCGGTGTAGGTCGTTCGCTCC
AAGCTGGGCTGTGTGCACGAACCCCCCGTTCAGCCCGACCGCTGCGCCTTATCCGGTAACTATCG
TCTTGAGTCCAACCCGGTAAGACACGACTTATCGCCACTGGCAGCAGCCACTGGTAACAGGATTA
GCAGAGCGAGGTATGTAGGCGGTGCTACAGAGTTCTTGAAGTGGTGGCCTAACTACGGCTACACT
AGAAGaACAGTATTTGGTATCCGCGCTCTGCTGAAGCCAGTTACCTTCGGAAAAAGAGTTGGTAG
CTCTTGATCCGGCAAACAAACCACCGCTGGTAGCGGTGGTTTTTTTGTTTGCAAGCAGCAGATTA
CGCGCAGgAAAAAAGGATCTCAAGAAGATCCTTTGATCTTTTCTACGTCAGTCCTGCTCCTCGGC
CACGAAGTGCACGCAGTTGCCGGCCGGGTCGCGCAGGGCGAACTCCCGCCCCCACGGCTGCTCGC
CGATCTCGGTCATGGCCGGCCCGGAGGCGTCCCGGAAGTTCGTGGACACGACCTCCGACCACTCG
GCGTACAGCTCGTCCAGGC
CD3E_24 CAG miniplasmid sequence:
(SEQ ID NO: 2051)
TTTCCATAGGCTCCGCCaCCCTGACGAGCA
TCACAAAAATCGACGCTCAAGTCAGAGGTGGCGAAACCCGACAGGACTATAAAGATACCAGGCGT
TTCCCCCTGGAAGCTCCCTCGTGCGCTCTCCTGTTCCGACCCTGCCGCTTACCGGATACCTGTCC
GCCTTTCTCCCTTCGGGAAGCGTGGCGCTTTCTCATAGCTCACGCTGTAGGTATCTCAGTTCGGT
GTAGGTCGTTCGCTCCAAGCTGGGCTGTGTGCACGAACCCCCCGTTCAGCCCGACCGCTGCGCCT
TATCCGGTAACTATCGTCTTGAGTCCAACCCGGTAAGACACGACTTATCGCCACTGGCAGCAGCC
ACTGGTAACAGGATTAGCAGAGCGAGGTATGTAGGCGGTGCTACAGAGTTCTTGAAGTGGTGGCC
TAACTACGGCTACACTAGAAGGACAGTATTTGGTATCTGCGCTCTGCTGAAGCCAGTTACCTTCG
GAAAAAGAGTTGGTAGCTCTTGATCCGGCAAACAAACCACCGCTGGTAGCGGTGGTTTTTTTGTT
TGCAAGCAGCAGATTACGCGCAGAAAAAAAGGATCTCAAGAAGATCCTTTGATCTTTTCTACGTC
AGTCCTGCTCCTCGGCCACGAAGTGCACGCAGTTGCCGGCCGGGTCGCGCAGGGCGAACTCCCGC
CCCCACGGCTGCTCGCCGATCTCGGTCATGGCCGGCCCGGAGGCGTCCCGGAAGTTCGTGGACAC
GACCTCCGACCACTCGGCGTACAGCTCGTCCAGGCCGCGCACCCACACCCAGGCCAGGGTGTTGT
CCGGCACCACCTGGTCCTGGACCGCGCTGATGAACAGGGTCACGTCGTCCCGGACCACACCGGCG
AAGTCGTCCTCCACGAAGTCCCGGGAGAACCCGAGCCGGTCGGTCCAGAACTCGACCGCTCCGGC
GACGTCGCGCGCGGTGAGCACCGGAACGGCACTGGTCAACTTGGCCATACTCTTCCTTTTCAATA
TTATTGAAGCATTTATCAGGGTTATTGTCTCATGAGCGGATACATAACGCGTGCCCTCAGTATCC
TGGATCTGAAAATTGGGATCCTCAGCAGACACGTGAGTTTATTGGTCTTTTATTTATGCCCTGTC
TGAGGATGCAGATTGGTGGGTAGATGAGAAGGAACTGATTGAGAGAGATTAACCCCAAGAACTGA
TATCTTCCCAGCATTGCATTCTCAACTCCATTTTAGAAAGGTTCCAAATAGGGACTTCTGTGGGT
TTTTCTTTACATCCATCTTACCCTTCCCAAGTCCCCATGTCCCTGCGTAAACCCTAAAGCCACCT
CTCAAaaggttctctagttcccttcaaggttctctagttcccttcaTTCCACATATCTCCTCTTC
CACACCCTCTAGCCAGTAGAGCTCCCTTCTGACAAGCAAGTCTAAGATCTAGATGACAGATGACT
TCCTGCATTTGGGTGGTTCTTTTGTCACTAATTTGCCTTTTCTAAAATTGTCCTGGTTTCTTCTG
CCAATTTCCCTTCTTTCTCCCCAGCATATAAAGTCTCCATCTCTGGAACCACAGTAATATTGACA
TGCCCTGATATCTCGACTAGTTATTAATAGTAATCAATTACGGGGTCATTAGTTCATAGCCCATA
TATGGAGTTCCGCGTTACATAACTTACGGTAAATGGCCCGCCTGGCTGACCGCCCAACGACCCCC
GCCCATTGACGTCAATAATGACGTATGTTCCCATAGTAACGCCAATAGGGACTTTCCATTGACGT
CAATGGGTGGAGTATTTACGGTAAACTGCCCACTTGGCAGTACATCAAGTGTATCATATGCCAAG
TACGCCCCCTATTGACGTCAATGACGGTAAATGGCCCGCCTGGCATTATGCCCAGTACATGACCT
TATGGGACTTTCCTACTTGGCAGTACATCTACGTATTAGTCATCGCTATTACCATGGTCGAGGTG
AGCCCCACGTTCTGCTTCACTCTCCCCATCTCCCCCCCCTCCCCACCCCCAATTTTGTATTTATT
TATTTTTTAATTATTTTGTGCAGCGATGGGGGCGGGGGGGGGGGGGGGGCGCGCGCCAGGCGGGG
CGGGGCGGGGCGAGGGGCGGGGCGGGGCGAGGCGGAGAGGTGCGGCGGCAGCCAATCAGAGCGGC
GCGCTCCGAAAGTTTCCTTTTATGGCGAGGCGGCGGCGGCGGCGGCCCTATAAAAAGCGAAGCGC
GCGGCGGGCGGGGAGTCGCTGCGACGCTGCCTTCGCCCCGTGCCCCGCTCCGCCGCCGCCTCGCG
CCGCCCGCCCCGGCTCTGACTGACCGCGTTACTCCCACAGGTGAGCGGGCGGGACGGCCCTTCTC
CTCCGGGCTGTAATTAGCGCTTGGTTTAATGACGGCTTGTTTCTTTTCTGTGGCTGCGTGAAAGC
CTTGAGGGGCTCCGGGAGGGCCCTTTGTGCGGGGGGAGCGGCTCGGGGGGTGCGTGCGTGTGTGT
GTGCGTGGGGAGCGCCGCGTGCGGCTCCGCGCTGCCCGGCGGCTGTGAGCGCTGCGGGCGCGGCG
CGGGGCTTTGTGCGCTCCGCAGTGTGCGCGAGGGGAGCGCGGCCGGGGGCGGTGCCCCGCGGTGC
GGGGGGGGCTGCGAGGGGAACAAAGGCTGCGTGCGGGGTGTGTGCGTGGGGGGGTGAGCAGGGGG
TGTGGGCGCGTCGGTCGGGCTGCAACCCCCCCTGCACCCCCCTCCCCGAGTTGCTGAGCACGGCC
CGGCTTCGGGTGCGGGGCTCCGTACGGGGCGTGGCGCGGGGCTCGCCGTGCCGGGCGGGGGGTGG
CGGCAGGTGGGGGTGCCGGGCGGGGCGGGGCCGCCTCGGGCCGGGGAGGGCTCGGGGGAGGGGCG
CGGCGGCCCCCGGAGCGCCGGCGGCTGTCGAGGCGCGGCGAGCCGCAGCCATTGCCTTTTATGGT
AATCGTGCGAGAGGGCGCAGGGACTTCCTTTGTCCCAAATCTGTGCGGAGCCGAAATCTGGGAGG
CGCCGCCGCACCCCCTCTAGCGGGCGCGGGGCGAAGCGGTGCGGCGCCGGCAGGAAGGAAATGGG
CGGGGAGGGCCTTCGTGCGTCGCCGCGCCGCCGTCCCCTTCTCCCTCTCCAGCCTCGGGGCTGTC
CGCGGGGGGACGGCTGCCTTCGGGGGGGACGGGGCAGGGCGGGGTTCGGCTTCTGGCGTGTGACC
GGCGGCTCTAGAGCCTCTGCTAACCATGTTCATGCCTTCTTCTTTTTCCTACAGCTCCTGGGCAA
CGTGCTGGTTATTGTGCTGTCTCATCATTTTGGCAAAGAATTAATTCGGATCCACCATGGCTCTC
CCAGTGACTGCCCTACTGCTTCCCCTAGCGCTTCTCCTGCATGCAGAGGTGAAGCTGCAGCAGTC
TGGGGCTGAGCTGGTGAGGCCTGGGTCCTCAGTGAAGATTTCCTGCAAGGCTTCTGGCTATGCAT
TCAGTAGCTACTGGATGAACTGGGTGAAGCAGAGGCCTGGACAGGGTCTTGAGTGGATTGGACAG
ATTTATCCTGGAGATGGTGATACTAACTACAATGGAAAGTTCAAGGGTCAAGCCACACTGACTGC
AGACAAATCCTCCAGCACAGCCTACATGCAGCTCAGCGGCCTAACATCTGAGGACTCTGCGGTCT
ATTTCTGTGCAAGAAAGACCATTAGTTCGGTAGTAGATTTCTACTTTGACTACTGGGGCCAAGGG
ACCACGGTCACCGTCTCCTCAGGTGGAGGTGGATCAGGaGGtGGaGGtTCTGGTGGAGGaGGATC
TGACATTGAGCTCACCCAGTCTCCAAAATTCATGTCCACATCAGTAGGAGACAGGGTCAGCGTCA
CCTGCAAGGCCAGTCAGAATGTGGGTACTAATGTAGCCTGGTATCAACAGAAACCAGGACAATCT
CCTAAACCACTGATTTACTCGGCAACCTACCGGAACAGTGGAGTCCCTGATCGCTTCACAGGCAG
TGGATCTGGGACAGATTTCACTCTCACCATCACTAACGTGCAGTCTAAAGACTTGGCAGACTATT
TCTGTCAACAATATAACAGGTATCCGTACACGTCCGGAGGGGGGACCAAGCTGGAGATCAAACGG
GCGGCCGCAATTGAAGTTATGTATCCTCCTACTTACCTAGACAATGAGAAGAGCAATGGAACCAT
TATCCATGTGAAAGGGAAACACCTTTGTCCAAGTCCCCTATTTCCCGGACCTTCTAAGCCCTTTT
GGGTGCTGGTGGTGGTTGGTGGAGTCCTGGCTTGCTATAGCTTGCTAGTAACAGTGGCCTTTATT
ATTTTCTGGGTGAGGAGTAAGAGGAGCAGGCTCCTGCACAGTGACTACATGAACATGACTCCtCG
CCGCCCCGGGCCtACaCGCAAGCATTACCAGCCCTATGCCCCACCACGCGACTTCGCAGCCTATC
GCTCCAGAGTGAAGTTCAGCAGGAGCGCAGAGCCCCCCGCGTACCAGCAGGGCCAGAACCAGCTC
TATAACGAGCTCAATCTAGGACGAAGAGAGGAGTACGATGTTTTGGACAAGAGACGTGGCCGGGA
CCCTGAGATGGGGGGAAAGCCGAGAAGGAAGAACCCTCAGGAAGGCCTGTACAATGAACTGCAGA
AAGATAAGATGGCGGAGGCCTACAGTGAGATTGGGATGAAAGGCGAGCGCCGGAGGGGCAAGGGG
CACGATGGCCTTTACCAGGGTCTCAGTACAGCCACCAAGGACACCTACGACGCCCTTCACATGCA
GGCCCTGCCCCCTCGCTAACGACTGTGCCTTCTAGTTGCCAGCCATCTGTTGTTTGCCCCTCCCC
CGTGCCTTCCTTGACCCTGGAAGGTGCCACTCCCACTGTCCTTTCCTAATAAAATGAGGAAATTG
CATCGCATTGTCTGAGTAGGTGTCATTCTATTCTGGGGGGTGGGGTGGGGCAGGACAGCAAGGGG
GAGGATTGGGAAGACAATAGCAGGCATGCTGGGGATGCGGTGGGCTCTATGGCAGTATCCTGGAT
CTGAAATACTATGGCAACACAatgataaaaacataggcggtgatgaggatgataaaaacataggc
agtgatgaggatCACCTGTCACTGAAGGAATTTTCAGAATTGGAGCAAAGTGGTTATTATGTCTG
CTACCCCAGAGGAAGCAAACCAGAAGATGCGAACTTTTATCTCTACCTGAGGGCAAGAGGTAATC
CAGGTCTCCAGAACAGGTACCACCGGCTCTTTAGGGAGGACCATTCAAAAGGGCATTCTCAGTGA
TTTTCCCTAACCCAGCTCACAGTGCCCAGGCGTCTTTGCGCTTCCTCCCACACTCAATCCTGGGA
CTCTCTGGTACCACACGGCATCAGTGTTTTCTGGAATATAGATTAAACACCAATATGAGGCTTCT
GGGTAACCCCAGTCTGTGCGAGATCTAAAATAGCAACTCCCTAAGAGACAGGACTGGGTCATTTG
CACCGCATCACACCCAGGTTCATAGCACACCAGCGGCCGCTTTCAGATCCAGGATACTGAGGGCA
TGTT
CD3E_34 CAG miniplasmid sequence:
(SEQ ID NO: 2051)
TTTCCATAGGCTCCGCCaCCCTGACGAGCA
TCACAAAAATCGACGCTCAAGTCAGAGGTGGCGAAACCCGACAGGACTATAAAGATACCAGGCGT
TTCCCCCTGGAAGCTCCCTCGTGCGCTCTCCTGTTCCGACCCTGCCGCTTACCGGATACCTGTCC
GCCTTTCTCCCTTCGGGAAGCGTGGCGCTTTCTCATAGCTCACGCTGTAGGTATCTCAGTTCGGT
GTAGGTCGTTCGCTCCAAGCTGGGCTGTGTGCACGAACCCCCCGTTCAGCCCGACCGCTGCGCCT
TATCCGGTAACTATCGTCTTGAGTCCAACCCGGTAAGACACGACTTATCGCCACTGGCAGCAGCC
ACTGGTAACAGGATTAGCAGAGCGAGGTATGTAGGCGGTGCTACAGAGTTCTTGAAGTGGTGGCC
TAACTACGGCTACACTAGAAGGACAGTATTTGGTATCTGCGCTCTGCTGAAGCCAGTTACCTTCG
GAAAAAGAGTTGGTAGCTCTTGATCCGGCAAACAAACCACCGCTGGTAGCGGTGGTTTTTTTGTT
TGCAAGCAGCAGATTACGCGCAGAAAAAAAGGATCTCAAGAAGATCCTTTGATCTTTTCTACGTC
AGTCCTGCTCCTCGGCCACGAAGTGCACGCAGTTGCCGGCCGGGTCGCGCAGGGCGAACTCCCGC
CCCCACGGCTGCTCGCCGATCTCGGTCATGGCCGGCCCGGAGGCGTCCCGGAAGTTCGTGGACAC
GACCTCCGACCACTCGGCGTACAGCTCGTCCAGGCCGCGCACCCACACCCAGGCCAGGGTGTTGT
CCGGCACCACCTGGTCCTGGACCGCGCTGATGAACAGGGTCACGTCGTCCCGGACCACACCGGCG
AAGTCGTCCTCCACGAAGTCCCGGGAGAACCCGAGCCGGTCGGTCCAGAACTCGACCGCTCCGGC
GACGTCGCGCGCGGTGAGCACCGGAACGGCACTGGTCAACTTGGCCATACTCTTCCTTTTCAATA
TTATTGAAGCATTTATCAGGGTTATTGTCTCATGAGCGGATACATAACGCGTGCCCTCAGTATCC
TGGATCTGAAAATTGGGATCCTCAGCAGACACGTGAGTTTATTGGTCTTTTATTTATGCCCTGTC
TGAGGATGCAGATTGGTGGGTAGATGAGAAGGAACTGATTGAGAGAGATTAACCCCAAGAACTGA
TATCTTCCCAGCATTGCATTCTCAACTCCATTTTAGAAAGGTTCCAAATAGGGACTTCTGTGGGT
TTTTCTTTACATCCATCTTACCCTTCCCAAGTCCCCATGTCCCTGCGTAAACCCTAAAGCCACCT
CTCAAaaggttctctagttcccttcaaggttctctagttcccttcaTTCCACATATCTCCTCTTC
CACACCCTCTAGCCAGTAGAGCTCCCTTCTGACAAGCAAGTCTAAGATCTAGATGACAGATGACT
TCCTGCATTTGGGTGGTTCTTTTGTCACTAATTTGCCTTTTCTAAAATTGTCCTGGTTTCTTCTG
CCAATTTCCCTTCTTTCTCCCCAGCATATAAAGTCTCCATCTCTGGAACCACAGTAATATTGACA
TGCCCTGATATCTCGACTAGTTATTAATAGTAATCAATTACGGGGTCATTAGTTCATAGCCCATA
TATGGAGTTCCGCGTTACATAACTTACGGTAAATGGCCCGCCTGGCTGACCGCCCAACGACCCCC
GCCCATTGACGTCAATAATGACGTATGTTCCCATAGTAACGCCAATAGGGACTTTCCATTGACGT
CAATGGGTGGAGTATTTACGGTAAACTGCCCACTTGGCAGTACATCAAGTGTATCATATGCCAAG
TACGCCCCCTATTGACGTCAATGACGGTAAATGGCCCGCCTGGCATTATGCCCAGTACATGACCT
TATGGGACTTTCCTACTTGGCAGTACATCTACGTATTAGTCATCGCTATTACCATGGTCGAGGTG
AGCCCCACGTTCTGCTTCACTCTCCCCATCTCCCCCCCCTCCCCACCCCCAATTTTGTATTTATT
TATTTTTTAATTATTTTGTGCAGCGATGGGGGCGGGGGGGGGGGGGGGGCGCGCGCCAGGCGGGG
CGGGGCGGGGCGAGGGGCGGGGCGGGGCGAGGCGGAGAGGTGCGGCGGCAGCCAATCAGAGCGGC
GCGCTCCGAAAGTTTCCTTTTATGGCGAGGCGGCGGCGGCGGCGGCCCTATAAAAAGCGAAGCGC
GCGGCGGGCGGGGAGTCGCTGCGACGCTGCCTTCGCCCCGTGCCCCGCTCCGCCGCCGCCTCGCG
CCGCCCGCCCCGGCTCTGACTGACCGCGTTACTCCCACAGGTGAGCGGGCGGGACGGCCCTTCTC
CTCCGGGCTGTAATTAGCGCTTGGTTTAATGACGGCTTGTTTCTTTTCTGTGGCTGCGTGAAAGC
CTTGAGGGGCTCCGGGAGGGCCCTTTGTGCGGGGGGAGCGGCTCGGGGGGTGCGTGCGTGTGTGT
GTGCGTGGGGAGCGCCGCGTGCGGCTCCGCGCTGCCCGGCGGCTGTGAGCGCTGCGGGCGCGGCG
CGGGGCTTTGTGCGCTCCGCAGTGTGCGCGAGGGGAGCGCGGCCGGGGGCGGTGCCCCGCGGTGC
GGGGGGGGCTGCGAGGGGAACAAAGGCTGCGTGCGGGGTGTGTGCGTGGGGGGGTGAGCAGGGGG
TGTGGGCGCGTCGGTCGGGCTGCAACCCCCCCTGCACCCCCCTCCCCGAGTTGCTGAGCACGGCC
CGGCTTCGGGTGCGGGGCTCCGTACGGGGCGTGGCGCGGGGCTCGCCGTGCCGGGCGGGGGGTGG
CGGCAGGTGGGGGTGCCGGGCGGGGCGGGGCCGCCTCGGGCCGGGGAGGGCTCGGGGGAGGGGCG
CGGCGGCCCCCGGAGCGCCGGCGGCTGTCGAGGCGCGGCGAGCCGCAGCCATTGCCTTTTATGGT
AATCGTGCGAGAGGGCGCAGGGACTTCCTTTGTCCCAAATCTGTGCGGAGCCGAAATCTGGGAGG
CGCCGCCGCACCCCCTCTAGCGGGCGCGGGGCGAAGCGGTGCGGCGCCGGCAGGAAGGAAATGGG
CGGGGAGGGCCTTCGTGCGTCGCCGCGCCGCCGTCCCCTTCTCCCTCTCCAGCCTCGGGGCTGTC
CGCGGGGGGACGGCTGCCTTCGGGGGGGACGGGGCAGGGCGGGGTTCGGCTTCTGGCGTGTGACC
GGCGGCTCTAGAGCCTCTGCTAACCATGTTCATGCCTTCTTCTTTTTCCTACAGCTCCTGGGCAA
CGTGCTGGTTATTGTGCTGTCTCATCATTTTGGCAAAGAATTAATTCGGATCCACCATGGCTCTC
CCAGTGACTGCCCTACTGCTTCCCCTAGCGCTTCTCCTGCATGCAGAGGTGAAGCTGCAGCAGTC
TGGGGCTGAGCTGGTGAGGCCTGGGTCCTCAGTGAAGATTTCCTGCAAGGCTTCTGGCTATGCAT
TCAGTAGCTACTGGATGAACTGGGTGAAGCAGAGGCCTGGACAGGGTCTTGAGTGGATTGGACAG
ATTTATCCTGGAGATGGTGATACTAACTACAATGGAAAGTTCAAGGGTCAAGCCACACTGACTGC
AGACAAATCCTCCAGCACAGCCTACATGCAGCTCAGCGGCCTAACATCTGAGGACTCTGCGGTCT
ATTTCTGTGCAAGAAAGACCATTAGTTCGGTAGTAGATTTCTACTTTGACTACTGGGGCCAAGGG
ACCACGGTCACCGTCTCCTCAGGTGGAGGTGGATCAGGaGGtGGaGGtTCTGGTGGAGGaGGATC
TGACATTGAGCTCACCCAGTCTCCAAAATTCATGTCCACATCAGTAGGAGACAGGGTCAGCGTCA
CCTGCAAGGCCAGTCAGAATGTGGGTACTAATGTAGCCTGGTATCAACAGAAACCAGGACAATCT
CCTAAACCACTGATTTACTCGGCAACCTACCGGAACAGTGGAGTCCCTGATCGCTTCACAGGCAG
TGGATCTGGGACAGATTTCACTCTCACCATCACTAACGTGCAGTCTAAAGACTTGGCAGACTATT
TCTGTCAACAATATAACAGGTATCCGTACACGTCCGGAGGGGGGACCAAGCTGGAGATCAAACGG
GCGGCCGCAATTGAAGTTATGTATCCTCCTACTTACCTAGACAATGAGAAGAGCAATGGAACCAT
TATCCATGTGAAAGGGAAACACCTTTGTCCAAGTCCCCTATTTCCCGGACCTTCTAAGCCCTTTT
GGGTGCTGGTGGTGGTTGGTGGAGTCCTGGCTTGCTATAGCTTGCTAGTAACAGTGGCCTTTATT
ATTTTCTGGGTGAGGAGTAAGAGGAGCAGGCTCCTGCACAGTGACTACATGAACATGACTCCtCG
CCGCCCCGGGCCtACaCGCAAGCATTACCAGCCCTATGCCCCACCACGCGACTTCGCAGCCTATC
GCTCCAGAGTGAAGTTCAGCAGGAGCGCAGAGCCCCCCGCGTACCAGCAGGGCCAGAACCAGCTC
TATAACGAGCTCAATCTAGGACGAAGAGAGGAGTACGATGTTTTGGACAAGAGACGTGGCCGGGA
CCCTGAGATGGGGGGAAAGCCGAGAAGGAAGAACCCTCAGGAAGGCCTGTACAATGAACTGCAGA
AAGATAAGATGGCGGAGGCCTACAGTGAGATTGGGATGAAAGGCGAGCGCCGGAGGGGCAAGGGG
CACGATGGCCTTTACCAGGGTCTCAGTACAGCCACCAAGGACACCTACGACGCCCTTCACATGCA
GGCCCTGCCCCCTCGCTAACGACTGTGCCTTCTAGTTGCCAGCCATCTGTTGTTTGCCCCTCCCC
CGTGCCTTCCTTGACCCTGGAAGGTGCCACTCCCACTGTCCTTTCCTAATAAAATGAGGAAATTG
CATCGCATTGTCTGAGTAGGTGTCATTCTATTCTGGGGGGTGGGGTGGGGCAGGACAGCAAGGGG
GAGGATTGGGAAGACAATAGCAGGCATGCTGGGGATGCGGTGGGCTCTATGGCAGTATCCTGGAT
CTGAAATACTATGGCAACACAatgataaaaacataggcggtgatgaggatgataaaaacataggc
agtgatgaggatCACCTGTCACTGAAGGAATTTTCAGAATTGGAGCAAAGTGGTTATTATGTCTG
CTACCCCAGAGGAAGCAAACCAGAAGATGCGAACTTTTATCTCTACCTGAGGGCAAGAGGTAATC
CAGGTCTCCAGAACAGGTACCACCGGCTCTTTAGGGAGGACCATTCAAAAGGGCATTCTCAGTGA
TTTTCCCTAACCCAGCTCACAGTGCCCAGGCGTCTTTGCGCTTCCTCCCACACTCAATCCTGGGA
CTCTCTGGTACCACACGGCATCAGTGTTTTCTGGAATATAGATTAAACACCAATATGAGGCTTCT
GGGTAACCCCAGTCTGTGCGAGATCTAAAATAGCAACTCCCTAAGAGACAGGACTGGGTCATTTG
CACCGCATCACACCCAGGTTCATAGCACACCAGCGGCCGCTTTCAGATCCAGGATACTGAGGGCA
TGTT
PLA074-TRAC043 P2A miniplasmid sequence:
(SEQ ID NO: 2052)
AGGCTAGGTGGAGGCTCAGTGATG
ATAAGTCTGCGATGGTGGATGCATGTGTCATGGTCATAGCTGTTTCCTGTGTGAAATTGTTATCC
GCTCAGAGGGCACAATCCTATTCCGCGCTATCCGACAATCTCCAAGACATTAGGTGGAGTTCAGT
TCGGCGTATGGCATATGTCGCTGGAAAGAACATGTGAGCAAAAGGCCAGCAAAAGGCCAGGAACC
GTAAAAAGGCCGCGTTGCTGGCGTTTTTCCATAGGCTCCGCCCCCCTGACGAGCATCACAAAAAT
CGACGCTCAAGTCAGAGGTGGCGAAACCCGACAGGACTATAAAGATACCAGGCGTTTCCCCCTGG
AAGCTCCCTCGTGCGCTCTCCTGTTCCGACCCTGCCGCTTACCGGATACCTGTCCGCCTTTCTCC
CTTCGGGAAGCGTGGCGCTTTCTCATAGCTCACGCTGTAGGTATCTCAGTTCGGTGTAGGTCGTT
CGCTCCAAGCTGGGCTGTGTGCACGAACCCCCCGTTCAGCCCGACCGCTGCGCCTTATCCGGTAA
CTATCGTCTTGAGTCCAACCCGGTAAGACACGACTTATCGCCACTGGCAGCAGCCACTGGTAACA
GGATTAGCAGAGCGAGGTATGTAGGCGGTGCTACAGAGTTCTTGAAGTGGTGGCCTAACTACGGC
TACACTAGAAGAACAGTATTTGGTATCTGCGCTCTGCTGAAGCCAGTTACCTTCGGAAAAAGAGT
TGGTAGCTCTTGATCCGGCAAACAAACCACCGCTGGTAGCGGTGGTTTTTTTGTTTGCAAGCAGC
AGATTACGCGCAGAAAAAAAGGATCTCAAGAAGATCCTTTGATCTTTTCTACGGGGTCTGACGCT
CTATTCAACAAAGCCGCCGTCCCGTCAAGTCAGCGTAAATGGGTAGGGGGCTTCAAATCGTCCTC
GTGATACCAATTCGGAGCCTGCTTTTTTGTACAAACTTGTTGATAATGGCAATTCAAGGATCTTC
ACCTAGATCCTTTTAAATTAAAAATGAAGTTTTAAATCAATCTAAAGTATATATGAGTAAACTTG
GTCTGACAGTTACCAATGCTTAATCAGTGAGGCACCTATCTCAGCGATCTGTCTATTTCGTTCAT
CCATAGTTGCCTGACTCCCCGTCGTGTAGATAACTACGATACGGGAGGGCTTACCATCTGGCCCC
AGTGCTGCAATGATACCGCGAGAGCCACGCTCACCGGCTCCAGATTTATCAGCAATAAACCAGCC
AGCCGGAAGGGCCGAGCGCAGAAGTGGTCCTGCAACTTTATCCGCCTCCATCCAGTCTATTAATT
GTTGCCGGGAAGCTAGAGTAAGTAGTTCGCCAGTTAATAGTTTGCGCAACGTTGTTGCCATTGCT
ACAGGCATCGTGGTGTCACGCTCGTCGTTTGGTATGGCTTCATTCAGCTCCGGTTCCCAACGATC
AAGGCGAGTTACATGATCCCCCATGTTGTGCAAAAAAGCGGTTAGCTCCTTCGGTCCTCCGATCG
TTGTCAGAAGTAAGTTGGCCGCAGTGTTATCACTCATGGTTATGGCAGCACTGCATAATTCTCTT
ACTGTCATGCCATCCGTAAGATGCTTTTCTGTGACTGGTGAGTACTCAACCAAGTCATTCTGAGA
ATAGTGTATGCGGCGACCGAGTTGCTCTTGCCCGGCGTCAATACGGGATAATACCGCGCCACATA
GCAGAACTTTAAAAGTGCTCATCATTGGAAAACGTTCTTCGGGGCGAAAACTCTCAAGGATCTTA
CCGCTGTTGAGATCCAGTTCGATGTAACCCACTCGTGCACCCAACTGATCTTCAGCATCTTTTAC
TTTCACCAGCGTTTCTGGGTGAGCAAAAACAGGAAGGCAAAATGCCGCAAAAAAGGGAATAAGGG
CGACACGGAAATGTTGAATACTCATACTCTTCCTTTTTCAATATTATTGAAGCATTTATCAGGGT
TATTGTCTCATGAGCGGATACATATTTGAATGTATTTAGAAAAATAAACAAATAGGGGTTCCGCG
CACATTTCCCCGAAAAGTGCCAGATACCTGAAACAAAACCCATCGTACGGCCAAGGAAGTCTCCA
ATAACTGTGATCCACCACAAGCGCCAGGGTTTTCCCAGTCACGACGTTGTAAAACGACGGCCAGT
CATGCATAATCCGCACGCATCTGGAATAAGGAAGTGCCATTCCGCCTGACCTCCTCAGCAATGCC
AACATACCATAAACCTCCCATTCTGCTAATGCCCAGCCTAAGTTGGGGAGACCACTCCAGATTCC
AAGATGTACAGTTTGCTTTGCTGGGCCTTTTTCCCATGCCTGCCTTTACTCTGCCAGAGTTATAT
TGCTGGGGTTTTGAAGAAGATCCTATTAAATAAAAGAATAAGCAGTATTATTAAGTAGCCCTGCA
TTTCAGGTTTCCTTGAGTGGCAGGCCAGGCCTGGCCGTGAACGTTCACTGAAATCATGGCCTCTT
GGCCAAGATTGATAGCTTGTGCCTGTCCCTGAGTCCCAGTCCATCACGAGCAGCTGGTTTCTAAG
ATGCTATTTCCCGTATAAAGCATGAGACCGTGACTTGCCAGCCCCACAGAGCCCCGCCCTTGTCC
ATCACTGGCATCTGGACTCCAGCCTGGGTTGGGGCAAAGAGGGAAATGAGATCATGTCCTAACCC
TGATCCTCTTGTCCCACAGATATCCAGAACCCTGACCCTGCCGTGGGCAGCGGCGCTACTAACTT
CAGCCTGCTGAAGCAGGCTGGCGACGTGGAGGAGAACCCTGGACCTATGGCTCTCCCAGTGACTG
CCCTACTGCTTCCCCTAGCGCTTCTCCTGCATGCAGAGGTGAAGCTGCAGCAGTCTGGGGCTGAG
CTGGTGAGGCCTGGGTCCTCAGTGAAGATTTCCTGCAAGGCTTCTGGCTATGCATTCAGTAGCTA
CTGGATGAACTGGGTGAAGCAGAGGCCTGGACAGGGTCTTGAGTGGATTGGACAGATTTATCCTG
GAGATGGTGATACTAACTACAATGGAAAGTTCAAGGGTCAAGCCACACTGACTGCAGACAAATCC
TCCAGCACAGCCTACATGCAGCTCAGCGGCCTAACATCTGAGGACTCTGCGGTCTATTTCTGTGC
AAGAAAGACCATTAGTTCGGTAGTAGATTTCTACTTTGACTACTGGGGCCAAGGGACCACGGTCA
CCGTCTCCTCAGGTGGAGGTGGATCAGGTGGAGGTGGATCTGGTGGAGGTGGATCTGACATTGAG
CTCACCCAGTCTCCAAAATTCATGTCCACATCAGTAGGAGACAGGGTCAGCGTCACCTGCAAGGC
CAGTCAGAATGTGGGTACTAATGTAGCCTGGTATCAACAGAAACCAGGACAATCTCCTAAACCAC
TGATTTACTCGGCAACCTACCGGAACAGTGGAGTCCCTGATCGCTTCACAGGCAGTGGATCTGGG
ACAGATTTCACTCTCACCATCACTAACGTGCAGTCTAAAGACTTGGCAGACTATTTCTGTCAACA
ATATAACAGGTATCCGTACACGTCCGGAGGGGGGACCAAGCTGGAGATCAAACGGGCGGCCGCAA
TTGAAGTTATGTATCCTCCTACTTACCTAGACAATGAGAAGAGCAATGGAACCATTATCCATGTG
AAAGGGAAACACCTTTGTCCAAGTCCCCTATTTCCCGGACCTTCTAAGCCCTTTTGGGTGCTGGT
GGTGGTTGGTGGAGTCCTGGCTTGCTATAGCTTGCTAGTAACAGTGGCCTTTATTATTTTCTGGG
TGAGGAGTAAGAGGAGCAGGCTCCTGCACAGTGACTACATGAACATGACTCCCCGCCGCCCCGGG
CCCACCCGCAAGCATTACCAGCCCTATGCCCCACCACGCGACTTCGCAGCCTATCGCTCCAGAGT
GAAGTTCAGCAGGAGCGCAGAGCCCCCCGCGTACCAGCAGGGCCAGAACCAGCTCTATAACGAGC
TCAATCTAGGACGAAGAGAGGAGTACGATGTTTTGGACAAGAGACGTGGCCGGGACCCTGAGATG
GGGGGAAAGCCGAGAAGGAAGAACCCTCAGGAAGGCCTGTACAATGAACTGCAGAAAGATAAGAT
GGCGGAGGCCTACAGTGAGATTGGGATGAAAGGCGAGCGCCGGAGGGGCAAGGGGCACGATGGCC
TTTACCAGGGTCTCAGTACAGCCACCAAGGACACCTACGACGCCCTTCACATGCAGGCCCTGCCC
CCTCGCTAACGACTGTGCCTTCTAGTTGCCAGCCATCTGTTGTTTGCCCCTCCCCCGTGCCTTCC
TTGACCCTGGAAGGTGCCACTCCCACTGTCCTTTCCTAATAAAATGAGGAAATTGCATCGCATTG
TCTGAGTAGGTGTCATTCTATTCTGGGGGGTGGGGTGGGGCAGGACAGCAAGGGGGAGGATTGGG
AAGACAATAGCAGGCATGCTGGGGATACCAGCTGAGAGACTCTAATTCCAGTGACAAGTCTGTCT
GCCTATTCACCGATTTTGATTCTCAAACAAATGTGTCACAAAGTAAGGATTCTGATGTGTATATC
ACAGACAAAACTGTGCTAGACATGAGGTCTATGGACTTCAAGAGCAACAGTGCTGTGGCCTGGAG
CAACAAATCTGACTTTGCATGTGCAAACGCCTTCAACAACAGCATTATTCCAGAAGACACCTTCT
TCCCCAGCCCAGGTAAGGGCAGCTTTGGTGCCTTCGCAGGCTGTTTCCTTGCTTCAGGAATGGCC
AGGTTCTGCCCAGAGCTCTGGTCAATGATGTCTAAAACTCCTCTGATTGGTGGTCTCGGCCTTAT
CCATTGCCACCAAAACCCTCTTTTTACTAAGAAACAGTGAGCCTTGTTCTGGCAGTCCAGAGAAT
GACACGGGAAAAAAGCAGATGAAGAGAAGGTGGCAGGAGAGGGCACGTGGCCCAGCCTCAGTCTC
TCCAACTGAGTTCCTGCCTGCCTGCCTTTGCTCAGACTGTTTGCCCCTTACTGCTCTTCTAGGCC
TCATTCTAAGCCCCTTCTCCAAGTTGCCTCTCCTTATTTCTCCCTGTCTGCCAAGCGGCCGC

### IX. EQUIVALENTS

[0373] Throughout the description, where compositions are described as having, including, or comprising specific components, or where processes and methods are described as having, including, or comprising specific steps, it is contemplated that, additionally, there are compositions of the present invention that consist essentially of, or consist of, the recited components, and that there are processes and methods according to the present invention that consist essentially of, or consist of, the recited processing steps.

[0374] In the application, where an element or component is said to be included in and/or selected from a list of recited elements or components, it should be understood that the element or component can be any one of the recited elements or components, or the element or component can be selected from a group consisting of two or more of the recited elements or components.

[0375] Further, it should be understood that elements and/or features of a composition or a method described herein can be combined in a variety of ways without departing from the spirit and scope of the present invention, whether explicit or implicit herein. For example, where reference is made to a particular compound, that compound can be used in various embodiments of compositions of the present invention and/or in methods of the present invention, unless otherwise understood from the context. In other words, within this application, embodiments have been described and depicted in a way that enables a clear and concise application to be written and drawn, but it is intended and will be appreciated that embodiments may be variously combined or separated without parting from the present teachings and invention(s). For example, it will be appreciated that all features described and depicted herein can be applicable to all aspects of the invention(s) described and depicted herein.

[0376] The terms “a” and “an” and “the” and similar references in the context of describing the invention (especially in the context of the following claims) are to be construed to cover both the singular and the plural, unless otherwise indicated herein or clearly contradicted by context. For example, the term “a cell” includes a plurality of cells, including mixtures thereof. Where the plural form is used for compounds, salts, or the like, this is taken to mean also a single compound, salt, or the like.

[0377] It should be understood that the expression “at least one of” includes individually each of the recited objects after the expression and the various combinations of two or more of the recited objects unless otherwise understood from the context and use. The expression “and/or” in connection with three or more recited objects should be understood to have the same meaning unless otherwise understood from the context.

[0378] The use of the term “include,” “includes,” “including,” “have,” “has,” “having,” “contain,” “contains,” or “containing,” including grammatical equivalents thereof, should be understood generally as open-ended and non-limiting, for example, not excluding additional unrecited elements or steps, unless otherwise specifically stated or understood from the context.

[0379] Where the use of the term “about” is before a quantitative value, the present invention also includes the specific quantitative value itself, unless specifically stated otherwise. As used herein, the term “about” refers to a +10% variation from the nominal value unless otherwise indicated or inferred.

[0380] It should be understood that the order of steps or order for performing certain actions is immaterial so long as the present invention remain operable. Moreover, two or more steps or actions may be conducted simultaneously.

[0381] The use of any and all examples, or exemplary language herein, for example, “such as” or “including,” is intended merely to illustrate better the present invention and does not pose a limitation on the scope of the invention unless claimed. No language in the specification should be construed as indicating any non-claimed element as essential to the practice of the present invention.

[0382] The invention may be embodied in other specific forms without departing from the spirit or essential characteristics thereof. The foregoing embodiments are therefore to be considered in all respects illustrative rather than limiting on the invention described herein. Scope of the invention is thus indicated by the appended claims rather than by the foregoing description, and all changes that come within the meaning and range of equivalency of the claims are intended to be embraced therein.

The application's sequence listing, which the Patent Office published only in electronic form, follows.

SEQUENCE LISTING (2052 sequences)

SEQ ID NO: 1 - protein, 1244 aa, synthetic construct
METFSGFTNLYPLSKTLRFRLIPVGETLKHFIDSGILEEDQHRAESYVKVKAIIDDYHRAYIENSLSGFELPLESTKFNSLEEYYLYHNIRNKTEEIQNLSSKVRTNLRKQVVAQLTKNEIFKRIDKKELIQSDLIDFVKNEPDANEKIALISEFRNFTVYFKGFHENRRNMYSDEEKSTSIAFRLIHENLPKFIDNMEVFAKIQNTSISENFDAIQKELCPELVTLCEMFKLGYFNKTLSQKQIDAYNTVIGGKTTSEGKKIKGLNEYINLYNQQHKQEKLPKMKLLFKQILSDRESASWLPEKFENDSQVVGAIVNFWNTIHDTVLAEGGLKTIIASLGSYGLEGIFLKNDLQLTDISQKATGSWGKISSEIKQKIEVMNPQKKKESYETYQERIDKIFKSYKSFSLAFINECLRGEYKIEDYFLKLGAVNSSSLQKENHFSHILNTYTDVKEVIGLYSESTDTKLIQDNDSIQKIKQFLDAVKDLQAYVKPLLGNGDETGKDERFYGDLIEYWSLLDLITPLYNMVRNYVTQKPYSVDKIKINFQNPTLLNGWDLNKETDNTSVILRRDGKYYLAIMNNKSRKVFLKYPSGTDRNCYEKMEYKLLPGANKMLPKVFFSKSRINEFMPNERLLSNYEKGTHKKSGTCFSLDDCHTLIDFFKKSLDKHEDWKNFGFKFSDTSTYEDMSGFYKEVENQGYKLSFKPIDATYVDQLVDEGKIFLFQIYNKDFSEHSKGTPNMHTLYWKMLFDETNLGDVVYKLNGEAEVFFRKASINVSHPTHPANIPIKKKNLKHKDEERILKYDLIKDKRYTVDQFQFHVPITMNFKADGNGNINQKAIDYLRSASDTHIIGIDRGERNLLYLVVIDGNGKICEQFSLNEIEVEYNGEKYSTNYHDLLNVKENERKQARQSWQSIANIKDLKEGYLSQVIHKISELMVKYNAIVVLEDLNAGFMRGRQKVEKQVYQKFEKKLIEKLNYLVFKKQSSDLPGGLMHAYQLANKFESFNTLGKQSGFLFYIPAWNTSKMDPVTGFVNLFDVKYESVDKAKSFFSKFDSIRYNVERDMFEWKFNYGEFTKKAEGTKTDWTVCSYGNRIITFRNPDKNSQWDNKEINLTENIKLLFERFGIDLSSNLKDEIMQRTEKEFFIELISLFKLVLQMRNSWTGTDIDYLVSPVCNENGEFFDSRNVDETLPQNADANGAYNIARKGMILLDKIKKSNGEKKLALSITNREWLSFAQGCCKNG

SEQ ID NO: 2 - protein, 1197 aa, synthetic construct
MLSNFTNQYQLSKTLRFELKPVGDTLKHIEKSGLIAQDEIRSQEYQEVKTIIDKYHKAFIDEALQNVVLSNLEEYEALFFERNRDEKAFEKLQAVLRKEIVAHFKQHPQYKTLFKKELIKADLKNWQELSDAEKELVSHFDNFTTYFTGFHENRANMYTDEAKHSSIAYRIIHENLPIFLTNKKLFETIKQKAPHLAQETQDALLEYLSGAIVEDMFELSYFNHLLSQTHIDLYNQMIGGVKQDSLKIQGLNEKINLYRQANGLSKRELPNLKPLHKQILSDRETLSWLPESFESDEELMQGVQAYFESEVLAFECCDGKVNLLEKLPELLHQTQDYDFSKVYFKNDLALTAASQAIFKDYRIIKEALWEVNKPKKSKDLVADEEKFFNKKNSYFSIEQIDGALNSAQLSANMMHYFQSESTKVIEQIQLTYNDWKRNSSNKELLKAFLDALLSYQRLLKPLNAPNDLEKDVAFYAYFDAYFTSLCGVVKLYDKVRNFMTKKPYSLEKFKLNFENSTLLDGWDVNKESDNTAILFRKEGLYYLGIMNKKYNKVFRNISSSQDEGYQKIDYKLLPGANKMLPKVFFSDKNKEYFKPNAKLLERYKAGEHKKGDNFDLDFCHELIDFFKTSIEKHQDWKHFAYQFSPTESYEDLSGFYREVEQQGYKISYKNIAASFIDTLVAEGKLYFFQIYNKDFSPYSKGTPNMHTLYWRALFDEKNLADVIYKLNGQAEIFFRKKSIEYSQEKLQKGHHHEMLKDKFAYPIIKDRRFAFDKFQFHVPITLNFKAEGNENITPKTFEYIRSNPDNIKVIGIDRGERHLLYLSLIDAEGKIVEQFTLNQIINSYNGKDHVIDYHAKLDAKEKDRDKARKEWGTVENIKELKEGYLSHVIHKIATLIIEHGAVVAMEDLNFGFKRGRFKVEKQVYQKFEKALIDKLNYLVDKKKEPHKLGGLLNALQLTSKFQSFEKMGKQNGFLFYVPAWNTSKIDPVTGFVNLFDTRYASVEKSKAFFTKFQSICYNEAKDYFELVFDYNDFTEKAKETRSEWTLCTYGERIVSFRNAEKNHQWDSKTIHLTTEFKNLFGELHGNDVKEYILEQNSVEFFKSLIYLLKITLQMRNSITGTDIDYLVSPVADEAGNFYDSRKADTSLPKDADANGAYNIARKGLMLMHRIQNAEDLKKVNLAISNRDWLRNAQGLDK

SEQ ID NO: 3 - protein, 1252 aa, synthetic construct
MIDLKQFIGIYPVSKTLRFELRPVGKTQEWIEKNRVLEGDEQKAADYPVVKKLIDDYHKVCIHDSLNHVHFDWEPLKDAIEIFQKTKSDEAKKRLEAEQAMMRKKIAAAIKDFKHFKELTAATPSDLITSVLPEFSDDGSLKSFRGFATYFSGFQENRNNIYSQEAISTGVPYRLVHDNFPKFLSDLEVFERIKSTCPEVINQASAELQPFLEGVMIDDIFSLDFYNSLLTQNGIDFFNQVIGGVSEKDKQKYRGINEFSNLYRQQHKEIAASKKAMTMIPLFKQILSDRDTLSYIPAQIRTEDELVSSITQFYDHITHFEHDGKTINVLSEIVALLGKLDTYDPNGICITARKLTDISQKVYGKWSVIEEKMKEKAIQQYGDISVAKNKKKVDAFLSRKAYSLSDLCFDEEISFSRYYSELPQTLNAISGYWLQFNEWCKSDEKQKFLNNQTGTEVVKSLLDAMMELFHKCSVLVMPEEYEVDKSFYNEFLPLYEELDTLFLLYNKVRNYLTQKPSDVKKFKLNFESPSLASGWDQNKEMKNNAILLFKDGKSYLGVLNAKNKAKIKDAKGDVSSSSYKKMIYKLLSDPSKDLPHKIFAKGNLDFYKPSEYILEGRELGKYKKGPNFDKKFLHDFIDFYKAAISIDPDWSKFNFQYSPTESYDDIGMFFSEIKKQAYKIRFTDISEAQVNEWVDNGQLYLFQLYNKDYAEGAHGRKNLHTLYWENLFTDENLSNLVLKLNGQAELFCRPQSIKKPVSHKIGSKMLNRRDKSGMPIPESIYRSLYQYYNGKKKESELTVAEKQYIDQVIVKDVTHEIIKDRRYTRQEYFFHVPLTFNANADGNEYINEHVLNYLKDNPDVNIIGIDRGERHLIYLTLINQRGEILKQKTFNVVNSYNYQAKLEQREKERDEARKSWDSVGKIKDLKEGFLSAVIHEITNMMIENNAIVVLEDLNFGFKRGRFKVERQVYQKFEKMLIDKLNYLSFKDREAGEEGGILRGYQMAQKFISFQRLGKQSGFLFYIPAAYTSKIDPVSGFVNHFNFSDITNAEKRKDFLMKMDRIEMKNGNIEFTFDYRKFKTFQTDYQNVWTVSTFGKRIVMRIDEKGYKKMVDYEPTNDIIKAFKNKGILLSEGSDLKALIAEIEANATNAGFYSTLLYAFQKTLQMRNSNAVTEEDYILSPVAKDGHQFCSTDEANKGKDAQGNWVSKLPVDADANGAYHIALKGLYLLRNPETKKIENEKWLQFMVEKPYLE

SEQ ID NO: 4 - protein, 1287 aa, synthetic construct
MSYNREKMEEKELGKNQNFQEFIGVSPLQKTLRNELIPTETTKKNIAQLDLLTEDEVRAQNREKLKEMMDDYYRDVIDSTLRGELLIDWSYLFSCMRNHLSENSKESKRELERTQDSVRSQIHDKFAERADFKDMFGASIITKLLPTYIKQNSKYSERYDESVKIMKLYGKFTTSLTDYFETRKNIFSKEKISSAVGYRIVEENAEIFLQNQNAYDRICKIAGLDLHGLDNEITAYVDGKTLKEVCSDEGFAKVITQGGIDRYNEAIGAVNQYMNLLCQKNKALKPGQFKMKRLHKQILCKGTTSFDIPKKFENDKQVYDAVNSFTEIVTKNNDLKRLLNITQNANDYDMNKIYVVADAYSMISQFISKKWNLIEECLLDYYSDNLPGKGNAKENKVKKAVKEETYRSVSQLNEVIEKYYVEKTGQSVWKVESYISSLAEMIKLELCHEIDNDEKHNLIEDDEKISEIKELLDMYMDVFHIIKVFRVNEVLNFDETFYSEMDEIYQDMQEIVPLYNHVRNYVTQKPYKQEKYRLYFHTPTLANGWSKSKEYDNNAIILVREDKYYLGILNAKKKPSKEIMAGKEDCSEHAYAKMNYYLLPGANKMLPKVFLSKKGIQDYHPSSYIVEGYNEKKHIKGSKNFDIRFCRDLIDYFKECIKKHPDWNKFNFEFSATETYEDISVFYREVEKQGYRVEWTYINSEDIQKLEEDGQLFLFQIYNKDFAVGSTGKPNLHTLYLKNLFSEENLRDIVLKLNGEAEIFFRKSSVQKPVIHKCGSILVNRTYEITESGTTRVQSIPESEYMELYRYFNSEKQIELSDEAKKYLDKVQCNKAKTDIVKDYRYTMDKFFIHLPITINFKVDKGNNVNAIAQQYIAEQEDLHVIGIDRGERNLIYVSVIDMYGRILEQKSFNLVEQVSSQGTKRYYDYKEKLQNREEERDKARKSWKTIGKIKELKEGYLSSVIHEIAQMVVKYNAIIAMEDLNYGFKRGRFKVERQVYQKFETMLISKLNYLADKSQAVDEPGGILRGYQMTYVPDNIKNVGRQCGIIFYVPAAYTSKIDPTTGFINAFKRDVVSTNDAKENFLMKFDSIQYDIEKGLFKFSFDYKNFATHKLTLAKTKWDVYTNGTRIQNMKVEGHWLSMEVELTTKMKELLDDSHIPYEEGQNILDDLREMKDITTIVNGILEIFWLTVQLRNSRIDNPDYDRIISPVLNNDGEFFDSDEYNSYIDAQKAPLPIDADANGAFCIALKGMYTANQIKENWVEGEKLPADCLKIEHASWLAFMQGERG

SEQ ID NO: 5 - protein, 1295 aa, synthetic construct
MSAVFKIKESTMKDFTHQYSLSKTLRFELKPVGETAERIEDFKNQGLKSIVEEDRQRAEDYKKMKRILDDYHKEFIEEVLNDDIFTANEMESAFEVYRKYMASKNDDKLKKEITEIFTDLRKKIAKAFENKSKEYCLYKGDFSKLINEKKTGKDKGPGKLWYWLKAKADAGVNEFGDGQTFEQAEEALAKFNNFSTYFTGFNQNRDNIYTDAEQQTAISYRVINENMTRYFDNCIRYSSIENKYPELVKQLEPLSGKFAPGNYKDYLSQTAIDIYNEAVGHKSDDINAKGINQFINEYRQRNSIKGRELPIMSVLYKQILSDINKDLIIDKFENAGELLDAVKTLHRELTDKKILLKIKQTLNEFLTEDNSEDIYIKSGTDLTAVSNAIWGEWSVIPKALEMYAENITDMNAKAREKWLKREAYHLKTVQEAIEAYLKDNEEFETRNISEYFTNFKSGENDLIQVVQSAYAKMESIFGIEDFHKDRRPVTESGEPGEGFRQVELVREYLDSLINVEHFIKPLHMFRSGKPIELEDCNSNFYDPLNEAYKELDVVFGIYNKVRNYVTQKPYSKDKFKINFQNSTLLDGWDVNKESANSSVLLLKNGKYYLGVMKQGASNILNYRPEPSDSKNKINAKKQLSEIALAGATDDYYEKMIYKLLPDPAKMLPKVFFSAKNIEFYNPSQEIIYIRENGLFKKDAGDKESLKKWIGFMKTSLLKHPEWGSYFNFEFEPAEDYQDISIFYKQVAEQGYSVTFDKIKTSYIEEKVASGELYLFEIYNKDFSPHSKGRPNLHTMYWKSLFEKENLQNLVTKLNGEAEVFFRQHSIKRNEKVVHRANRPIQNKNPLTEKKQSIFEYDLVKDRRFTKDKFFLHCPITLNFKEAGPGRFNDKVNKYIAGNPDIRIIGIDRGERHLLYYSLIDQSGRIVEQGTLNQITSTLNSGGREIPKTTDYRGLLDTKEKERDKARKSWSMIENIKELKSGYLSHIVHKLAKLMVKNNAVVVLEDLNFGFKRGRFKVEKQVYQKFEKALIEKLNYLVFKDARPAEPGHYLNAYQLTAPLESFKKLGKQSGFIYYVPAWNTSKIDPVTGFVNQFYIEKNSMQYLKNFFGKFDSIRFNPDKNYFEFGFDYKNFHNKAAKSKWTICTHGDKRSWYNRKQRKLEIHNVTENLASLLSGKGINFADGGSIKDKILSVDDASFFKSLAFNFKLTAQLRHTFEDNGEEIDCIISPVAAADGTFFCSETAKKLNMELPHDADANGAYNIARKGLMVLRQIRESGKPKPISNADWLDFAQQNED

SEQ ID NO: 6 - protein, 1245 aa, synthetic construct
MQERKKISHLTHRNSVQKTIRMQLNPVGKTMDYFQAKQILENDEKLKENYQKIKEIADRFYRNLNEDVLSKTGLDKLKDYAEIYYHCNTDAERKRLDECASELRKEIVKNFKNRDEYNKLFNKKMIEIVLPQHLKNEDEKEVVASFKNFTTYFTGFFTNRKNMYSDGEESTAIAYRCINENLPKHLDNVKAFEKAISKLSKNAIDDLDATYSGLCGTNLYDVFTVDYFNFLLPQSGITEYNKIIGGYTTSDGTKVKGINEYINLYNQQVSKRDKIPNLKILYKQILSESEKVSFIPPKFEDDNELLSAVSEFYANDETFDGMPLKKAIDETKLLFGNLDNSSLNGIYIQNDRSVTNLSNSMFGSWSVIEDLWNKNYDSVNSNSRIKDIQKREDKRKKAYKAEKKLSLSFLQVLISNSENDEIREKSIVNYYKTSLMQLTDNLSDKYNEAAPLLNKSYANEKGLKNDDKSISLIKNFLDAIKEIEKFIKPLSETNITGEKNDLFYSQFTPLLDNISRIDILYDKVRNYVTQKPFSTDKIKLNFGNSQLLNGWDRNKEKDCGAVWLCRDEKYYLAIIDKSNNSILENIDFQDCDENDCYEKIIYKLLPGPNKMLPKVFFSEKCKKLLSPSDEILKIRKNGTFKKGDKFSLDDCHKLIDFYKESFKKYPNWLIYNFKFKNTNEYNDIREFYNDVASQGYNISKMKIPTSFIDKLVDEGKIYLFQLYNKDFSPHSKGTPNLHTLYFKMLFDERNLEDVVYKLNGEAEMFYRPASIKYDKPTHPKNTPIKNKNTLNDKKTSTFPYDLIKDKRYTKWQFSLHFPITMNFKAPDRAMINDDVRNLLKSCNNNFIIGIDRGERNLLYVSVIDSNGAIIYQHSLNIIGNKFKGKTYETNYREKLATREKERTEQRRNWKAIESIKELKEGYISQAVHVICQLVVKYDAIIVMEKLTDGFKRGRTKFEKQVYQKFEKMLIDKLNYYVDKKLDPDEGGGLLHAYQLTNKLESFDKLGMQSGFIFYVRPDFTSKIDPVTGFVNLLYPRYENIDKAKDMISRFDDIGYNAGEDFFEFDIDYDKFPKTASDYRKRWTICTNGERIEAFRNPAKNNEWSYRTIILAEKFKELFDNNSINYRDSDDLKAEILSQTKGKFFEDFFKLLRLTLQMRNSNPETGEDRILSPVKDKNGNFYDSSKYDEKSKLPCDADANGAYNIARKGLWIVEQFKKSDNVSTVGPVIHNDKWLKFVQENDMANN

SEQ ID NO: 7 - protein, 1281 aa, synthetic construct
MNILKENYMKEIKELTGLYSLTKTIGVELKPVGKTQELIEAKKLIEQDDQRAEDYKIVKDIIDRYHKDFIDKCLNCVKIKKDDLEKYVSLAENSNRDAEDFDKIKTKMRNQITEAFRKNSLFTNLFKKNLIKEYLPAFVSEEEKSVVNKFSKFTTYFDAFNDNRKNLYSGDAKSGTIAYRLIHENLPMFLDNIASFNAISGIGVNEYFSSIETEFTDTLEGKRLTEFFQIDFFNNTLTQKKIGNYNYIVGAVNKAVNLYKQQHKTVRVPLLKPLYKMILSDRVTPSWLPERFESDEEMLTAIKAAYESLREVLVGDNDESLRNLLLNIEHYDLEHIYIANDSGLTSISQKIFGCYDTYTLAIKDQLQRDYPATKKQREAPDLYDERIDKLYKKVGSFSIAYLNRLVDAKGHFTINEYYKQLGAYCREEGKEKDDFFKRIDGAYCAISHLFFGEHGEIAQSDSDVELIQKLLEAYKGLQRFIKPLLGHGDEADKDNEFDAKLRKVWDELDIITPLYDKVRNWLSRKIYNPEKIKLCFENNGKLLSGWVDSRTKSDNGTQYGGYIFRKKNEIGEYDFYLGISADTKLFRRDAAISYDDGMYERLDYYQLKSKTLLGNSYVGDYGLDSMNLLSAFKNAAVKFQFEKEVVPKDKENVPKYLKRLKLDYAGFYQILMNDDKVVDAYKIMKQHILATLTSSIRVPAAIELATQKELGIDELIDEIMNLPSKSFGYFPIVTAAIEEANKRENKPLFLFKMSNKDLSYAATASKGLRKGRGTENLHSMYLKALLGMTQSVFDIGSGMVFFRHQTKGLAETTARHKANEFVANKNKLNDKKKSIFGYEIVKNKRFTVDKYLFKLSMNLNYSQPNNNKIDVNSKVREIISNGGIKNIIGIDRGERNLLYLSLIDLKGNIVMQKSLNILKDDHNAKETDYKGLLTEREGENKEARRNWKKIANIKDLKRGYLSQVVHIISKMMVEYNAIVVLEDLNPGFIRGRQKIERNVYEQFERMLIDKLNFYVDKHKGANETGGLLHALQLTSEFKNFKKSEHQNGCLFYIPAWNTSKIDPATGFVNLFNTKYTNAVEAQEFFSKFDEIRYNEEKDWFEFEFDYDKFTQKAHGTRTKWTLCTYGMRLRSFKNSAKQYNWDSEVVALTEEFKRILGEAGIDIHENLKDAICNLEGKSQKYLEPLMQFMKLLLQLRNSKAGTDEDYILSPVADENGIFYDSRSCGDQLPENADANGAYNIARKGLMLIEQIKNAEDLNNVKFDISNKAWLNFAQQKPYKNG

SEQ ID NO: 8 - protein, 1293 aa, synthetic construct
MAKENIFNELTGKYQLSKTLRLELKPVGNTQQMLKDEDVFEKDRIIREKYRETRPHFDRLHREFIEQALKNQKLSDLGKYFQCLAKLQNNKKDKEAQEEFKRISQNLRKEVNDLFKIDPLFGEGVFALLKEKYGEKDDAFLREQDGQYVLDENKKKISIFDSWKGFTGYFTKFQETRKNFYKDDGTATAVATRIIDQNLKRFCENIQIFKSIQKKVDFKEVEDNFSVDLEDIFSLGFYSSCFLQEGIDVYNKILGGEPKTTGEKLRGLNELINRYRQDHKGEKLPFFKMLDKQILSEKEKFIESIEDDEELLKTLKEFYSSAEEKTTVLKELFNDFIKNNENYDLSEIYISREALNTISHRWVSAATLPEFEKSVYEVMKKDKPSGLSFDKDDNSYKFPDFIALSYIKGSFEKLSGEKLWKDGYFRDETRNGDKGFLIGNESLWTQFIKIFEFEFNSLFEAKNTERSVGYYHFKKDFEKIITNDFSVNPEDKVIIREFADNVLAIYQMAKYFAIEKKRKWMDQYDTGDFYNHPDFGYKTKFYDNAYEKIVKARMLLQSYLTKKPFSTDKWKLNFECGYLLNGWSSSFNTYGSLLFRTGNEYYLGVVNGSALRTEKIKRLTGNITEANSCHKMVYDFQKPDNKNVPRIFIRSKGDKFAPAVSELNLPVDSILEIYDKGLFKTENKNSPFFKPSLKKLIDYFKLGFSRHASYKHYQFKWKDSSEYKNISEFYNDTIRSCYQIKWEELNFEEVKKLTNSKDLFLFQIYNKDFSEKSTGNKNLHSIYFDGLFLDNNINAQDGVILKLSGGGEIFFRPKTDVKKLGSRTDTKGKLVIKNKRYSQDKIFLHFPIELNYSNTQESNFNKLVRNFLADNPDINIIGVDRGEKHLIYYAGIDQKGNTLKDKDDKDVLGSLNEINGVNYYKLLEERAKAREKARQDWQNIQGIKDLKMGYISLVVRKLADLIIEYNAILVLEDLNMRFKQIHGGIEKSVYQQLEKALIEKLNFLVNKGEKDPERAGHLLRAYQLTAPFSTFKDMGKQTGVLFYTQASYTSKTCPQCGFRPNIKLHFDNLENAKKMLEKINIVYKDNHFEIGYKVSDFTKTEKTSRGNILYGDRQGKDTFVISSKAAIRYKWFARNIKNNELNRGESLKEHTEKGVTIQYDITECLKILYEKNGIDHSGDITKQSIRSELPAKFYKDLLFYLYLLTNTRSSISGTEIDYINCPDCGFHSEKGFNGCIFNGDANGAYNIARKGMLILKKINQYKDQHHTMDKMGWGDLFIGIEEWDKYTQVVSRS

SEQ ID NO: 9 - protein, 1273 aa, synthetic construct
MKEIKELTGLYSLTKTIGVELKPVGKTQELIEAKKLIEQDDQRAEDYKIVKDIIDRYHKDFIDKCLNCVKIKKDDLEKYVSLAENSNRDAEDFDKIKTKMRNQITEAFRKNSLFTNLFKKNLIKEYLPAFVSEEEKSVVNKFSKFTTYFDAFNDNRKNLYSGDAKSGTIAYRLIHENLPMFLDNIASFNAISGIGVNEYFSSIETEFTDTLEGKRLTEFFQIDFFNNTLTQKKIGNYNYIVGAVNKAVNLYKQQHKTVRVPLLKPLYKMILSDRVTPSWLPERFESDEEMLTAIKAAYESLREVLVGDNDESLRNLLLNIEHYDLEHIYIANDSGLTSISQKIFGCYDTYTLAIKDQLQRDYPATKKQREAPDLYDERIDKLYKKVGSFSIAYLNRLVDAKGHFTINEYYKQLGAYCREEGKEKDDFFKRIDGAYCAISHLFFGEHGEIAQSDSDVELIQKLLEAYKGLQRFIKPLLGHGDEADKDNEFDAKLRKVWDELDIITPLYDKVRNWLSRKIYNPEKIKLCFENNGKLLSGWVDSRTKSDNGTQYGGYIFRKKNEIGEYDFYLGISADTKLFRRDAAISYDDGMYERLDYYQLKSKTLLGNSYVGDYGLDSMNLLSAFKNAAVKFQFEKEVVPKDKENVPKYLKRLKLDYAGFYQILMNDDKVVDAYKIMKQHILATLTSSIRVPAAIELATQKELGIDELIDEIMNLPSKSFGYFPIVTAAIEEANKRENKPLFLFKMSNKDLSYAATASKGLRKGRGTENLHSMYLKALLGMTQSVFDIGSGMVFFRHQTKGLAETTARHKANEFVANKNKLNDKKKSIFGYEIVKNKRFTVDKYLFKLSMNLNYSQPNNNKIDVNSKVREIISNGGIKNIIGIDRGERNLLYLSLIDLKGNIVMQKSLNILKDDHNAKETDYKGLLTEREGENKEARRNWKKIANIKDLKRGYLSQVVHIISKMMVEYNAIVVLEDLNPGFIRGRQKIERNVYEQFERMLIDKLNFYVDKHKGANETGGLLHALQLTSEFKNFKKSEHQNGCLFYIPAWNTSKIDPATGFVNLFNTKYTNAVEAQEFFSKFDEIRYNEEKDWFEFEFDYDKFTQKAHGTRTKWTLCTYGMRLRSFKNSAKQYNWDSEVVALTEEFKRILGEAGIDIHENLKDAICNLEGKSQKYLEPLMQFMKLLLQLRNSKAGTDEDYILSPVADENGIFYDSRSCGDQLPENADANGAYNIARKGLMLIEQIKNAEDLNNVKFDISNKAWLNFAQQKPYKNG

SEQ ID NO: 10 - protein, 1300 aa, synthetic construct
MNFQPFFQKFVHLYPISKTLRFELIPQGATQKFISEKQVLLQDEIRARKYPEMKQAIDGYHKDFIQRALSNIDSQVFEQALNTFEDLFLRSQAERATDAYKKDFETAQTKLRELIVHSFEKGEFKQEYKSLFDKNLITNLLKPWVEQQNQIGDSNYTYHEDFNKFTTYFLGFHENRKNIYSKDPHKTALAYRLIHENLPKFLENNKILLKIQNDHPSLWEQLQTLNQTMPQLFDGWDFSQLMQVSFFSNTLTQTGIDQYNTIIGGISEGENRQKIQGINELINLYNQKQDKKNRVAKLKQLYKQILSDRSTLSFLPEKFVDDTELYHAINMFYLEHLHHQSMINGHSYTLLERVQLLINELANYDLSKVYLAPNQLSTVSHQMFGDFGYIGRALNYYYMQVIQPDYEQLLASAKTTKKIEATEKLKTIFLDTPQSLVVIQAAIDEYIQLQPSTKPHTQLTDFIISLLKQYETVADDQSIKVINVFSDIEGKYSCIKGLVNTKSESKREVLQDEKLATDIKAFMDAVNNVIKLLKPFSLNEKLVASVEKDARFYSDFEEIYQSLLIFVPLYNKVRNYITQKPYSTEKFKLNFNKPTLLSGWDANKEADNLSILLRKNGNYYLAIMDTAKGANKAFEPKTLNQLKVDDTTDCYEKMVYKLLSGPSKMFPKAFKAKNNEGNYYPTPELLTSYNNNEHLKNDKNFTLASLHAYIDWCKEYINRNPSWHQFNFKFSPTQSFQDISQFYSEVSSQSYKVHFQTIPSDYIDQLVAEGKLYLFQIYNKDFSPNAKGKENLHTLYFKALFSDENLKQPVFKLSGEAEMFYRPASLQLANTTIHKAGEPMAAKNPLTPNATRTLAYDIIKDRRFTTDKYLLHVPISLNFHAQESMSIKKHNDLVRQMIKHNHQDLHVIGIDRGEKHLLYVSVIDLKGNIVYQESLNSIKSEAQNFETPYHQLLQHREEGRAQARTAWGKIENIKELKDGYLSQVVHRIQQLILKYNAIVMLEDLNFGFKRGRFKIEKQIYQKFEKALIHKLNYVVDKSTQADELGGVRKAYQLTAPFESFEKLGKQSGVLFYVPAWNTSKIDPVTGFVDLLKPKYENLDKAQAFFNAFDSIHYNAQKNYFEFKVNLKQFAGLKAQAAQAEWTICSYGDERHVYQKKNAQQGETVIVNVTEELKVLFAKNNIEVAQSVELKETICTQTQVDFFKRLMWLLQVLLALRYSSSKDKLDYILSPVANAQGEFFDSRHASVQLPQDSDANGAYHIALKGLWVIEQLKAADNLDKVKLAISNDDWLHFAQQKPYLA

SEQ ID NO: 11 - protein, 1205 aa, synthetic construct
MYYQGLTKLYPISKTIRNELIPVGKTLEHIRMNNILEADIQRKSDYERVKKLMDDYHKQLINESLQDVHLSYVEEAADLYLNASKDKDIVDKFSKCQDKLRKEIVNLLKSHENFPKIGNKEIIKLLQSLSDTEKDYNALDSFSKFYTYFTSYNEVRKNLYSDEEKSSTAAYRLINENLPKFLDNIKAYSIAKSAGVRAKELTEEEQDCLFMTETFERTLTQDGIDNYNELIGKLNFAINLYNQQNNKLKGFRKVPKMKELYKQILSEREASFVDEFVDDEALLTNVESFSAHIKEFLESDSLSRFAEVLEESGGEMVYIKNDTSKTTFSNIVFGSWNVIDERLAEEYDSANSKKKKDEKYYDKRHKELKKNKSYSVEKIVSLSTETEDVIGKYIEKLQADIIAIKETREVFEKVVLKEHDKNKSLRKNTKAIEAIKSFLDTIKDFERDIKLISGSEHEMEKNLAVYAEQENILSSIRNVDSLYNMSRNYLTQKPFSTEKFKLNFNRATLLNGWDKNKETDNLGILLVKEGKYYLGIMNTKANKSFVNPPKPKTDNVYHKVNYKLLPGPNKMLPKVFFAKSNLEYYKPSEDLLAKYQAGTHKKGENFSLEDCHSLISFFKDSLEKHPDWSEFGFKFSDTKKYDDLSGFYREVEKQGYKITYTDIDVEYIDSLVEKDELYLFQIYNKDFSPYSKGNYNLHTLYLTMLFDERNLRNVVYKLNGEAEVFYRPASIGKDELIIHKSGEEIKNKNPKRAIDKPTSTFEYDIVKDRRYTKDKFMLHIPVTMNFGVDETRRFNEVVNDAIRGDDKVRVIGIDRGERNLLYVVVVDSDGTILEQISLNSIINNEYSIETDYHKLLDEKEGDRDRARKNWTTIENIKELKEGYLSQVVNVIAKLVLKYDAIICLEDLNFGFKRGRQKVEKQVYQKFEKMLIDKLNYLVIDKSRSQENPEEVGHVLNALQLTSKFTSFKELGKQTGIIYYVPAYLTSKIDPTTGFANLFYVKYESVEKSKDFFNRFDSICFNKVAGYFEFSFDYKNFTDRACGMRSKWKVCTNGERIIKYRNEEKNSSFDDKVIVLTEEFKKLFNEYGIAFNDCMDLTDAINAIDDASFFRKLTKLFQQTLQMRNSSADGSRDYIISPVENDNGEFFNSEKCDKSKPKDADANGAFNIARKGLWVLEQLYNSSSGEKLNLAMTNAEWLEYAQQHTI

SEQ ID NO: 12 - protein, 1306 aa, synthetic construct
MAKNFEDFKRLYPLSKTLRFEAKPIGATLDNIVKSGLLEEDEHRAASYVKVKKLIDEYHKVFIDRVLDNGCLPLDDKGDNNSLAEYYESYVSKAQDEDAIKKFKEIQQNLLSIIAKKLTDDKAYANLFGNKLIESYKDKADKTKLIDSDLIQFINTAESTQLVSMSQDEAKELVKEFWGFTTYFEGFFKNRKNMYTPEEKSTGIAYRLINENLPKFIDNMEAFKKAIARPEIQANMEELYSNFSEYLNVESIQEMFLLDYYNMLLTQKQIDVYNAIIGGKTDDEHDVKIKGINEYINLYNQQHKDDKLPKLKALFKQILSDRNAISWLPEEFNSDQEVLNAIKDCYERLAENVLGDKVLKSLLGSLADYSLDGIFIRNDLQLTDISQKMFGNWGVIQNAIMQNIKHVAPARKHKESEEDYEKRIAGIFKKADSFSISYINDCLNEADPNNAYFVENYFATFGAVNTPTMQRENLFALVQNAYTEVAALLHSDYPTVKHLAQDKANVSKIKALLDAIKSLQHFVKPLLGKGDESDKDERFYGELASLWAELDTVTPLYNMIRNYMTRKPYSQKKIKLNFENPQLLGGWDANKEKDYATIILRRNGLYYLAIMDKDSRKLLGKAMPSDGECYEKMVYKFFKDVTTMIPKCSTQLKDVQAYFKVNTDDYVLNSKAFNRPLTITKEVFDLNNVLYGKYKKFQKGYLTATGDNVGYTHAVNVWIKFCMDFLDSYDSTCIYDFSSLKPESYLSLDSFYQDVNLLLYKLSFTDVSASFIDQLVEEGKMYLFQIYNKDFSEYSKGTPNMHTLYWKALFDERNLADVVYKLNGQAEMFYRKKSIENTHPTHPANHPILNKNKDNKKKESLFEYDLIKDRRYTVDKFMFHVPITMNFKSSGSENINQDVKAYLRHADDMHIIGIDRGERHLLYLVVIDLQGNIKEQFSLNEIVNDYNGNTYHTNYHDLLDVREDERLKARQSWQTIENIKELKEGYLSQVIHKITQLMVRYHAIVVLEDLSKGFMRSRQKVEKQVYQKFEKMLIDKLNYLVDKKTDVSTPGGLLNAYQLTCKSDSSQKLGKQSGFLFYIPAWNTSKIDPVTGFVNLLDTHSLNSKEKIKAFFSKFDAIRYNKDKKWFEFNLDYDKFGKKAEDTRTKWTLCTRGMRIDTFRNKEKNSQWDNQEVDLTTEMKSLLEHYYIDIHGNLKDAISTQTDKAFFTGLLHILKLTLQMRNSITGTETDYLVSPVADENGIFYDSRSCGDQLPENADANGAYNIARKGLMLVEQIKDAEDLDNVKFDISNKAWLNFAQQKPYKNG

SEQ ID NO: 13 - protein, 1306 aa, synthetic construct
MAKNFEDFKRLYSLSKTLRFEAKPIGATLDNIVKSGLLDEDEHRAASYVKVKKLIDEYHKVFIDRVLDDGCLPLENKGNNNSLAEYYESYVSRAQDEDAKKKFKEIQQNLRSVIAKKLTEDKAYANLFGNKLIESYKDKEDKKKIIDSDLIQFINTAESTQLDSMSQDEAKELVKEFWGFVTYFYGFFDNRKNMYTAEEKSTGIAYRLVNENLPKFIDNIEAFNRAITRPEIQENMGVLYSDFSEYLNVESIQEMFQLDYYNMLLTQKQIDVYNAIIGGKTDDEHDVKIKGINEYINLYNQQHKDDKLPKLKALFKQILSDRNAISWLPEEFNSDQEVLNAIKDCYERLAENVLGDKVLKSLLGSLADYSLDGIFIRNDLQLTDISQKMFGNWGVIQNAIMQNIKRVAPARKHKESEEDYEKRIAGIFKKADSFSISYINDCLNEADPNNAYFVENYFATFGAVNTPTMQRENLFALVQNAYTEVAALLHSDYPTVKHLAQDKANVSKIKALLDAIKSLQHFVKPLLGKGDESDKDERFYGELASLWAELDTVTPLYNMIRNYMTRKPYSQKKIKLNFENPQLLGGWDANKEKDYATIILRRNGLYYLAIMDKDSRKLLGKAMPSDGECYEKMVYKFFKDVTTMIPKCSTQLKDVQAYFKVNTDDYVLNSKAFNKPLTITKEVFDLNNVLYGKYKKFQKGYLTATGDNVGYTHAVNVWIKFCMDFLNSYDSTCIYDFSSLKPESYLSLDAFYQDANLLLYKLSFARASVSYINQLVEEGKMYLFQIYNKDFSEYSKGTPNMHTLYWKALFDERNLADVVYKLNGQAEMFYRKKSIENTHPTHPANHPILNKNKDNKKKESLFDYDLIKDRRYTVDKFMFHVPITMNFKSVGSENINQDVKAYLRHADDMHIIGIDRGERHLLYLVVIDLQGNIKEQYSLNEIVNEYNGNTYHTNYHDLLDVREEERLKARQSWQTIENIKELKEGYLSQVIHKITQLMVRYHAIVVLEDLSKGFMRSRQKVEKQVYQKFEKMLIDKLNYLVDKKTDVSTPGGLLNAYQLTCKSDSSQKLGKQSGFLFYIPAWNTSKIDPVTGFVNLLDTHSLNSKEKIKAFFSKFDAIRYNKDKKWFEFNLDYDKFGKKAEDTRTKWTLCTRGMRIDTFRNKEKNSQWDNQEVDLTTEMKSLLEHYYIDIHGNLKDAISAQTDKAFFTGLLHILKLTLQMRNSITGTETDYLVSPVADENGIFYDSRSCGNQLPENADANGAYNIARKGLMLIEQIKNAEDLNNVKFDISNKAWLNFAQQKPYKNG

SEQ ID NO: 14 - protein, 1274 aa, synthetic construct
MAKNFEDFKRLYSLSKTLRFEAKPIGATLDNIVKSDLLDEDEHRAASYVKVKKLIDEYHKVFIDRVLDDGCLPLENKGNNNSLAEYYESYVSRAQDEDAKKKFKEIQQNLRSVIAKKLTEDKAYANLFGNKLIESYKDKEDKKKIIDSDLIQFINTAESTQLDSMSQDEAKELVKEFWGFVTYFYGFFDNRKNMYTAEEKSTGIAYRLVNENLPKFIDNIEAFNRAITRPEIQENMGVLYSDFSEYLNVESIQEMFQLDYYNMLLTQKQIDVYNAIIGGKTDDEHDVKIKGINDYINLYNQKHKDDKLPKLKALFKQILSDRNAISWLPEEFNSDQEVLNAIKDCYERLSENVLGDKVLKSMLGSLADYSLDGIFIRNDLQLTDISQKMFGNWSVIQNAIMQNIKHVAPARKHKESEEEYENRIAGIFKKADSFSISYIDACLNETDPNNAYFVENYFATLGAVDTPTMQRENLFALVQNAYTEITALLHSDYPTEKNLAQDKANVAKIKALLDAIKSLQHFVKPLLGKGDESDKDERFYGELASLWAELDTMTPLYNMIRNYMTRKPYSQKKIKLNFENPQLLGGWDANKEKDYATIILRRNGLYYLAIMNKDSKKLLGKAMPSDGECYEKMVYKLLPGANKMLPKVFFAKSRMEDFKPSKELVEKYYNGTHKKGKNFNIQDCHNLIDYFKQSIDKHEDWSKFGFKFSDTSTYEDLSGFYREVEQQGYKLSFARVSVSYINQLVEEGKMYLFQIYNKDFSEYSKGTPNMHTLYWKALFDERNLADVVYKLNGQAEMFYRKKSIENTHPTHPANHPILNKNKDNKKKESLFGYDLIKDRRYTVDKFLFHVPITMNFKSSGSENINQDVKAYLRHADDMHIIGIDRGERHLLYLVVIDLQGNIKEQFSLNEIVNDYNGNTYHTNYHDLLDVREDERLKARQSWQTIENIKELKEGYLSQVIHKITQLMVKYHAIVVLEDLNMGFMRGRQKVEKQVYQKFEKMLIEKLNYLVDKKADASVSGGLLNAYQLTSKFDSFQKLGKQSGFLFYIPAWNTSKIDPVTGFVNLLDTRYQNVEKAKSFFSKFDAIRYNKDKEWFEFNLDYDKFGKKAEGTRTKWTLCTRGMRIDTFRNKEKNSQWDNQEVDLTAEMKSLLEHYYIDIHSNLKDAISAQTDKAFFTGLLHILKLTLQMRNSITGTETDYLVSPVVDENGIFYDSRSCGDELPENADANGAYNIARKGLMMIEQIKDAKDLDNLKFDISNKAWLNFAQQKPYKNG

SEQ ID NO: 15 - protein, 1251 aa, synthetic construct
MLFQDFTHLYPLSKTVRFELKPIGRTLEHIHAKNFLSQDETMADMYQKVKVILDDYHRDFIADMMGEVKLTKLAEFYDVYLKFRKNPKDDELQKQLKDLQAVLRKESVKPIGNGGKYKAGHDRLFGAKLFKDGKELGDLAKFVIAQEGKSSPKLAHLAHFEKFSTYFTGFHDNRKNMYSDEDKHTAIAYRLIHENLPRFIDNLQILTTIKQKHSALYDQIINELTASGLDVSLASHLDGYHKLLTQEGITAYNRIIGEVNGYTNKHNQICHKSERIAKLRPLHKQILSDGMGVSFLPSKFADDSEMCQAVNEFYRHYADVFAKVQSLFDGFDDHQKDGIYVEHKNLNELSKQAFGDFALLGRVLDGYYVDVVNPEFNERFAKAKTDNAKAKLTKEKDKFIKGVHSLASLEQAIKHHTARHDDESVQAGKLGQYFKHGLAGVDNPIQKIHNNHSTIKGFLERERPAGERALPKIKSGKNPEMTQLRQLKELLDNALNVAHFAKLLMTKTTLDNQDGNFYGEFGVLYDELAKIPTLYNKVRDYLSQKPFSTEKYKLNFGNPTLLNGWDLNKEKDNFGVILQKDGCYYLALLDKAHKKVFDNAPNTGKNVYQKMIYKLLPGPNKMLPRVFFAKSNLDYYNPSAELLDKYAQGTHKKGDNFNLKDCHALIDFFKAGINKHPEWQNFGFKFSPTSSYRDLSDFYREVEPQGYQVKFVDINADYIDELVEQGQLYLFQIYNKDFSPKAHGKPNLHTLYFRALFSEDNLANPIYKLNGEAQIFYRKASLGMNETTIHRAGEILENKNPDNPKERVFTYDIIKDRRYTQDKFMLHVPITMNFGVQGMTIKEFNKKVNQSIRQYDDVNVIGIDRGERHLLYLTVINSKGEILEQRSLNDITTASANGTQMTTPYHKILDKREIERLNARVGWGEIETIKELKSGYLSHVVHQVSQLMLKYNAIVVLEDLNFGFKRGRFKVEKQIYQNFENALIKKLNHLELKDKADDEIGSYKNALQLTNNFTDLKNIGKQTGFLFYVPAWNTSKIDPETGFVDLLKPRYENIAQSQAFFGKFDKICYNADKDYFEFHIDYAKFTDKAKNSRQTWTICSHGDKRYVYDKTANQNKGATKGINVNDELKSLFARYHINEKQPNLVMDICQNNDKEFHKSLMYLLKTLLALRYSNASSDEDFILSPVANDEGVFFNSALADDTQPQNADANGAYHIALKGLWLLNELKNSDDLNKVKLAIDNQTWLNFAQNR

SEQ ID NO: 16 - protein, 1251 aa, synthetic construct
MLFQDFTHLYPLSKTVRFELKPIGKTLEHIHAKNFLSQDETMADMYQKVKAILDDYHRDFITKMMSEVTLTKLPEFYEVYLALRKNPKDDTLQKQLTEIQTALREEVVKPIDSGGKYKAGYERLFGAKLFKDGKELGDLAKFVIAQEGESSPKLPQIAHFEKFSTYFTGFHDNRKNMYSSDDKHTAIAYRLIHENLPRFIDNLQILVTIKQKHSVLYDQIVNELNANGLDVSLASHLDGYHKLLTQEGITAYNRIIGEVNSYTNKHNQICHKSERIAKLRPLHKQILSDGMGVSFLPSKFADDSEMCQAVNEFYRHYAHVFAKVQSLFDRFDDYQKDGIYVEHKNLNELSKQAFGDFALLGRVLDGYYVDVVNPEFNDKFAKAKTDNAKEKLTKEKDKFIKGVHSLASLEQAIEHYIAGHDDESVQAGKLGQYFKHGLAGVDNPIQKIHNSHSTIKGFLERERPAGERTLPKIKSDKSLEMTQLRQLKELLDNALNVVHFAKLLTTKTTLDNQDGNFYGEFGALYDELAKIATLYNKVRDYLSQKPFSTEKYKLNFGNPTLLNGWDLNKEKDNFGVILQKDGCYYLALLDKAHKKVFDNAPNTGKSVYQKMVYKLLPGPNKMLPKVFFAKSNLDYYNPSAELLDKYAQGTHKKGDNFNLKDCHALIDFFKASINKHPEWQHFGFEFSLTSSYQDLSDFYREVEPQGYQVKFVDIDADYIDELVEQGQLYLFQIYNKDFSPKAHGKPNLHTLYFKALFSEDNLANPIYKLNGEAEIFYRKASLDMNETTIHRAGEVLENKNPDNPKERQFVYDIIKDKRYTQDKFMLHVPITMNFGVQGMTIKEFNKKVNQSIQQYDEVNVIGIDRGERHLLYLTVINSKGEILEQRSLNDIITTSANGTQMTTPYHKILDKREIERLNARVGWGEIETIKELKSGYLSHVVHQISQLMLKYNAIVVLEDLNFGFKRGRFKVEKQIYQNFENALIKKLNHLVLKDKADNEIGSYKNALQLTNNFTDLKSIGKQTGFLFYVPAWNTSKIDPVTGFVDLLKPRYENIAQSQAFFDKFDKICYNADKGYFEFHIDYAKFTDKAKNSRQIWTICSHGDKRYVYDKTANQNKGATIGINVNDELKSLFARYRINDKQPNLVMDICQNNDKEFHKSLTYLLKALLALRYSNASSDEDFILSPVANDKGVFFNSALADDTQPQNADANGAYHIALKGLWLLNELKNSDDLDKVKLAIDNQTWLNFAQNR

SEQ ID NO: 17 - protein, 1251 aa, synthetic construct
MLFQDFTHLYPLSKTVRFELKPIGKTLEHIHAKNFLSQDETMADMYQKVKAILDDYHRDFITKMMSEVTLTKLPEFYEVYLALRKNPKDDTLQKQLTEIQTALREEVVKPIDSGGKYKAGYERLFGAKLFKDGKELGDLAKFVIAQEGESSPKLPQIAHFEKFSTYFTGFHDNRKNMYSSDDKHTAIAYRLIHENLPRFIDNLQILVTIKQKHSVLYDQIVNELNANGLDVSLASHLDGYHKLLTQEGITAYNRIIGEVNSYTNKHNQICHKSERIAKLRPLHKQILSDGMGVSFLPSKFADDSEMCQAVNEFYRHYAHVFAKVQSLFDRFDDYQKDGIYVEHKNLNELSKQAFGDFALLGRVLDGYYVDVVNPEFNDKFAKAKTDNAKEKLTKEKDKFIKGVHSLASLEQAIEHYIAGHDDESVQAGKLGQYFKHGLAGVDNPIQKIHNSHSTIKGFLERERPAGERTLPKIKSDKSLEMTQLRQLKELLDNALNVVHFAKLLTTKTTLDNQDGNFYGEFGALYDELAKIATLYNKVRDYLSQKPFSTEKYKLNFGNPTLLNGWDLNKEKDNFGVILQKDGCYYLALLDKAHKKVFDNAPNTGKSVYQKMVYKLLPGSNKMLPKVFFAKSNLDYYNPSAELLDKYAQGTHKKGDNFNLKDCHALIDFFKASINKHPEWQHFGFEFSLTSSYQDLSDFYREVEPQGYQVKFVDIDADYIDELVEQGQLYLFQIYNKDFSPKAHGKPNLHTLYFKALFSEDNLANPIYKLNGEAEIFYRKASLDMNETTIHRAGEVLENKNPDNPKERQFVYDIIKDKRYTQDKFMLHVPITMNFGVQGMTIKEFNKKVNQSIQQYDEVNVIGIDRGERHLLYLTVINSKGEILEQRSLNDIITTSANGTQMTTPYHKILDKREIERLNARVGWGEIETIKELKSGYLSHVVHQISQLMLKYNAIVVLEDLNFGFKRGRFKVEKQIYQNFENALIKKLNHLVLKDKADNEIGSYKNALQLTNNFTDLKSIGKQTGFLFYVPAWNTSKIDPVTGFVDLLKPRYENIAQSQAFFDKFDKICYNADKGYFEFHIDYAKFTDKAKNSRQIWTICSHGDKRYVYDKTANQNKGATIGINVNDELKSLFARYRINDKQPNLVMDICQNNDKEFHKSLTYLLKALLALRYSNASSDEDFILSPVANDKGVFFNSALADDTQPQNADANGAYHIALKGLWLLNELKNSDDLDKVKLAIDNQTWLNFAQNR

SEQ ID NO: 18 - protein, 1257 aa, synthetic construct
MKYTDFTGIYPVSKTLRFELIPQGSTVENMKREGILNNDMHRADSYKEMKKLIDEYHKVFIERCLSDFSLKYDDTGKHDSLEEYFFYYEQKRNDKTKKIFEDIQVALRKQISKRFTGDTAFKRLFKKELIKEDLPSFVKNDPVKTELIKEFSDFTTYFQEFHKNRKNMYTSDAKSTAIAYRIINENLPKFIDNINAFHIVAKVPEMQEHFKTIADELRSHLQVGDDIDKMFNLQFFNKVLTQSQLAVYNAVIGGKSEGNKKIQGINEYVNLYNQQHKKARLPMLKLLYKQILSDRVAISWLQDEFDNDQDMLDTIEAFYNKLDSNETGVLGEGKLKQILMGLDGYNLDGVFLRNDLQLSEVSQRLCGGWNIIKDAMISDLKRSVQKKKKETGADFEERVSKLFSAQNSFSIAYINQCLGQAGIRCKIQDYFACLGAKEGENEAETTPDIFDQIAEAYHGAAPILNARPSSHNLAQDIEKVKAIKALLDALKRLQRFVKPLLGRGDEGDKDSFFYGDFMPIWEVLDQLTPLYNKVRNRMTRKPYSQEKIKLNFENSTLLNGWDLNKEHDNTSVILRREGLYYLGIMNKNYNKIFDANNVETIGDCYEKMIYKLLPGPNKMLPKVFFSKSRVQEFSPSKKILEIWESKSFKKGDNFNLDDCHALIDFYKDSIAKHPDWNKFNFKFSDTQSYTNISDFYRDVNQQGYSLSFTKVSVDYVNRMVDEGKLYLFQIYNKDFSPQSKGTPNMHTLYWRMLFDERNLHNVIYKLNGEAEVFYRKASLRCDRPTHPAHQPITCKNENDSKRVCVFDYDIIKNRRYTVDKFMFHVPITINYKCTGSDNINQQVCDYLRSAGDDTHIIGIDRGERNLLYLVIIDQHGTIKEQFSLNEIVNEYKGNTYCTNYHTLLEEKEAGNKKARQDWQTIESIKELKEGYLSQVIHKISMLMQRYHAIVVLEDLNGSFMRSRQKVEKQVYQKFEHMLINKLNYLVNKQYDAAEPGGLLHALQLTSRMDSFKKLGKQSGFLFYIPAWNTSKIDPVTGFVNLFDTRYCNEAKAKEFFEKFDDISYNDERDWFEFSFDYRHFTNKPTGTRTQWTLCTQGTRVRTFRNPEKSNHWDNEEFDLTQAFKDLFNKYGIDIASGLKARIVNGQLTKETSAVKDFYESLLKLLKLTLQMRNSVTGTDIDYLVSPVADKDGIFFDSRTCGSLLPANADANGAFNIARKGLMLLRQIQQSSIDAEKIQLAPIKNEDWLEFAQEKPYL

SEQ ID NO: 19 - protein, 1245 aa, synthetic construct
METFSGFTNLYPLSKTLRFRLIPVGETLKYFIGSGILEEDQHRAESYVKVKAIIDDYHRAYIENSLSGFELPLESTGKFNSLEEYYLYHNIRNKTEEIQNLSSKVRTNLRKQVVAQLTKNEIFKRIDKKELIQSDLIDFVKNEPDANEKIALISEFRNFTVYFKGFHENRRNMYSDEEKSTSIAFRLIHENLPKFIDNMEVFAKIQNTSISENFDAIQKELCPELVTLCEMFKLGYFNKTLSQKQIDAYNTVIGGKTTSEGKKIKGLNEYINLYNQQHKQEKLPKMKLLFKQILSDRESASWLPEKFENDSQVVGAIVNFWNTIHDTVLAEGGLKTIIASLGSYGLEGIFLKNDLQLTDISQKATGSWGKISSEIKQKIEVMNPQKKKESYETYQERIDKIFKSYKSFSLAFINECLRGEYKIEDYFLKLGAVNSSSLQKENHFSHILNTYTDVKEVIGFYSESTDTKLIRDNGSIQKIKLFLDAVKDLQAYVKPLLGNGDETGKDERFYGDLIEYWSLLDLITPLYNMVRNYVTQKPYSVDKIKINFQNPTLLNGWDLNKETDNTSVILRRDGKYYLAIMNNKSRKVFLKYPSGTDRNCYEKMEYKLLPGANKMLPKVFFSKSRINEFMPNERLLSNYEKGTHKKSGTCFSLDDCHTLIDFFKKSLDKHEDWKNFGFKFSDTSTYEDMSGFYKEVENQGYKLSFKPIDATYVDQLVDEGKIFLFQIYNKDFSEHSKGTPNMHTLYWKMLFDETNLGDVVYKLNGEAEVFFRKASINVSHPTHPANIPIKKKNLKHKDEERILKYDLIKDKRYTVDQFQFHVPITMNFKADGNGNINQKAIDYLRSASDTHIIGIDRGERNLLYLVVIDGNGKICEQFSLNEIEVEYNGEKYSTNYHDLLNVKENERKQARQSWQSIANIKDLKEGYLSQVIHKISELMVKYNAIVVLEDLNAGFMRGRQKVEKQVYQKFEKKLIEKLNYLVFKKQSSDLPGGLMHAYQLANKFESFNTLGKQSGFLFYIPAWNTSKMDPVTGFVNLFDVKYESVDKAKSFFSKFDSIRYNVERDMFEWKFNYGEFTKKAEGTKTDWTVCSYGNRIITFRNPDKNSQWDNKEINLTENIKLLFERFGIDLSSNLKDEIMQRTEKEFFIELISLFKLVLQMRNSWTGTDIDYLVSPVCNENGEFFDSRNVDETLPQNADANGAYNIARKGMILLDKIKKSNGEKKLALSITNREWLSFAQGCCKNG

SEQ ID NO: 20 - protein, 1245 aa, synthetic construct
METFSGFTNLYPLSKTLRFRLIPVGETLKHFIDSGILEEDQHRAESYVKVKAIIDDYHRAYIENSLSGFELPLESTGKFNSLEEYYLYHNIRNKTEEIQNLSSKVRTNLRKQVVVQLTKNEIFKRIDKKELIQSDLIDFVKNEPDANEKIALISEFRNFTVYFKGFHENRRNMYSDEEKSTSIAFRLIHENLPKFIDNMEVFAKIQNTSISENFDAIQKELCPELVTLCEMFKLGYFNKTLSQKQIDAYNTVIGGKTTSEGKKIKGLNEYINLYNQQHKQEKLPKMKLLFKQILSDRESASWLPEKFENDSQVVGAMVNFWNTIHDTVLAEGGLKTIIASLGSYGLEGIFLKNDLQLTDISQKATGSWSKISSEIKQKIEVMNPQKKKESYESYQERIDKLFKSYKSFSLAFINECLRGEYKIEDYFLKLGAVNSSSLQKENHFSHILNAYTDVKEAIGFYSESTDTKLIQDNDSIQKIKQFLDAVKDLQAYVKPLLGNGDETGKDERFYGDLIEYWSLLDLITPLYNMVRNYVTQKPYSVDKIKINFQNPTLLNGWDLNKETDNTSVILRRDGKYYLAIMNNKSRKVFLKYPSGTDGNCYEKMEYKLLPGANKMLPKVFFSKSRINEFMPNERLLSNYEKGTHKKSGICFSLDDCHTLIDFFKKSLDKHEDWKNFGFKFSDTSTYEDMSGFYKEVENQGYKLSFKPIDATYVDQLVDEGKIFLFQIYNKDFSEHSKGTPNMHTLYWKMLFDETNLGDVVYKLNGEAEVFFRKASINVSHPTHPANIPIKKKNLKHKDEERILKYDLIKDKRYTVDQFQFHVPITMNFKADGNGNINQKAIDYLCSASDTHIIGIDRGERNLLYLVVIDGNGKICEQFSLNEIEVEYNGEKYSTNYHDLLNVKENERKQARQSWQSIANIKDLKEGYLSQVIHKISELMVKYNAIVVLEDLNAGFMRGRQKVEKQVYQKFEKKLIEKLNYLVFKKQSSDLPGGLMHAYQLANKFESFNALGKQSGFLFYIPAWNTSKMDPVTGFVNLFDVKYESVDKAKSFFSKFDSMRYNVERDMFEWKFNYGEFTKKAEGTKTDWTVCSYGNRIITFRNPDKNSQWDNKEINLTENIKLLFERFGIDLSSNLKDEIMQRTEKEFFIELISLFKLVLQMRNSWTGTDIDYLVSPVCNENGEFFDSRNVDETLPQNADANGAYNIARKGMILLDKIKKSNGEKKLALSITNREWLSFAQGCCKNG

SEQ ID NO: 21 - protein, 1245 aa, synthetic construct
METFSGFTNLYPLSKTLRFRLIPVGETLKHFIGSGILEEDQHRAESYVKVKAIIDDYHRTYIENSLSGFELPLESTGKFNSLEEYYLYHNIRNKTEEIQNLSSKVRTNLRKQVVTQLTKNEIFKRIDKKELIQSDLIDFVKNEPDANEKIALISEFRNFTVYFKGFHENRRNMYSDEEKSTSIAFRLIHENLPKFIDNMEVFAKIQNTSISENFDAIQKELCPELVTLCEMFKLGYFNKTLSQKQIDAYNTVIGGKTTSEGKKIKGLNEYINLYNQQHKQEKLPKMKLLFKQILSDRESASWLLEKFENDSQVVGAMVNFWNTIHDTVLAEGGLKTIIASLGSYGLEGIFLKNDLQLTDISQKATGSWSKISSEIKQKIEAMNPQKKKESYESYQERIDKLFKSYKSFSLAFVNECLRGEYKIEDYFLKLGAVNSSLLQKENHFSHILNTYTDVKEVIGFYSESTDTKLIQDNDSIQKIKQFLDAVKDLQAYVKPLLGNSDETGKDERFYGDLIEYWSLLDLITPLYNMVRNYVTQKPYSVDKIKINFQNPTLLNGWDLNKEMDNTSVILRRDGKYYLAIMNNKSRKVFLKYPSGTDRNCYEKMEYKLLPGANKMLPKVFFSKSRINEFMPNERLLSNYEKGTHKKSGTCFSLDDCHTLIDFFKKSLNKHEDWKNFGFKFSDTSTYEDMSGFYKEVENQGYKLSFKPIDATYVDQLVDEGKIFLFQIYNKDFSEHSKGTPNMHTLYWKMLFDETNLGDVVYKLNGEAEVFFRKASINVSHPTHPANIPIKKKNLKHKDEERILKYDLIKDKRYTVDQFQFHVPITMNFKANGNGNINQKAIDYLRSASDTHIIGIDRGERNLLYLVVIDGNGKICEQFSLNEIEVEYNGEKYSTNYHDLLNVKENERKQARQSWQSIANIKDLKEGYLSQVIHKISELMVKYNAIVVLEDLNAGFMRGRQKVEKQVYQKFEKKLIEKLNYLVFKKQSSDLPGGLMHAYQLANKFESFNTLGKQSGFLFYIPAWNTSKMDPVTGFVNLFDVKYESVDKAKSFFSKFDSIRYNVERDMFEWKFNYDEFTKKAEGTKTDWTVCSYGNRIITFRNPDKNSQWDNKEINLTENIKLLFERFGIDLSSNLKDEIMERTEKEFFIELISLFKLVLQMRNSWTGTDIDYLVSPVCNENGEFFDSRNVDETLPQNADANGAYNIARKGMILLDKIKKNNGEKKLTLSITNREWLSFAQGCCKNG

SEQ ID NO: 22 - protein, 1261 aa, synthetic construct
MLFQDFTHLYPLSKTVRFELKPIGKTLEHIHAKNFLSQDKTMADMYQKVKAILDDYHRDFIADMMGEVKLTKLAEFCDVYLKFRKNPKDDGLQKQLKDLQAVLRKEIVKPIGNGGKYKVGYDRLFGAKLFKDGKELGDLAKFVIAQESESSPKLPQIAHFEKFSTYFTGFHDNRKNMYSSDDKHTAIAYRLIHENLPRFIDNLQILATIKQKHSALYDQIASELTASGLDVSLASHLGGYHKLLTQEGITAYNRIIGEVNSYTNKHNQICHKSERIAKLRPLHKQILSDGMGVSFLPSKFADDSEMCQAVNEFYRHYADVFAKVQSLFDRFDDYQKDGIYVEHKNLNELSKRAFGDFGFLKRFLEEYYADVIDPEFNEKFAKTEPDSDEQKKLAGEKDKFVKGVHSLASLEQVIEYYTAGYDDESVQADKLGQYFKHRLAGVDNPIQKIHNSHSTIKGFLERERPAGERALPKIKSDKSPEMTQLRQLKELLDNALNVVHFAKLVSTETVLDTRSDKFYGEFRPLYVELAKITTLYNKVRDYLSQKPFSTEKYKLNFGNPTLLNGWDLNKEKDNFGVILQKDGCYYLALLDKAHKKVFDNAPNTGKSVYQKMVYKQIANARRDLACLLIINGKVVRKTKGLDDLREKYLPYDIYKIYQSESYKVLSPNFNHQDLVKYIDYNKILASGYFEYFDFRFKESSEYKSYKEFLDDVDNCGYKISFCNINADYIDELVEQGQLYLFQIYNKDFSPKAHGKPNLHTLYFKALFSEDNLANPIYKLNGEAQIFYRKASLDMNETTIHRAGEVLENKNPDNPKQRQFVYDIIKDKRYTQDKFMLHVPITMNFGVQGMTIEGFNKKVNQSIQQYDDVNVIGIDRGERHLLYLTVINSKGEILEQRSLNDIITTSANGTQMTTPYHKILNKKKEGRLQARKDWGEIETIKELKAGYLSHVVHQISQLMLKYNAIVVLEDLNFGFKRGRLKVENQVYQNFENALIKKLNHLVLKDKTDDEIGSYKNALQLTNNFTDLKSIGKQTGFLFYVPARNTSKIDPETGFVDLLKPRYENITQSQAFFGKFDKICYNTDKGYFEFHIDYAKFTDEAKNSRQTWVICSHGDKRYVYNKTANQNKGATKGINVNDELKSLFACHHINDKQPNLVMDICQNNDKEFHKSLMYLLKALLALRYSNANSDEDFILSPVANDEGVFFNSALADDTQPQNADANGAYHIALKGLWVLEQIKNSDDLDKVDLEIKDDEWRNFAQNR

SEQ ID NO: 23 - protein, 1275 aa, synthetic construct
MGKNQNFQEFIGVSPLQKTLRNELIPTETTKKNITQLDLLTEDEIRAQNREKLKEMMDDYYRDVIDSTLHAGIAVDWSYLFSCMRNHLRENSKESKRELERTQDSIRSQIYNKFAERADFKDMFGASIITKLLPTYIKQNPEYSERYDESMEILKLYGKFTTSLTDYFETRKNIFSKEKISSAVGYRIVEENAEIFLQNQNAYDRICKIAGLDLHGLDNEITAYVDGKTLKEVCSDEGFAKAITQEGIDRYNEAIGAVNQYMNLLCQKNKALKPGQFKMKRLHKQILCKGTTSFDIPKKFENDKQVYDAVNSFTEIVMKNNDLKRLLNITQNVNDYDMNKIYVAADAYSTISQFISKKWNLIEECLLDYYSDNLPGKGNAKENKVKKAVKEETYRSVSQLNELIEKYYVEKTGQSVWKVESYISRLAETITLELCHEIENDEKHNLIEDDDKISKIKELLDMYMDAFHIIKVFRVNEVLNFDETFYSEMDEIYQDMQEIVPLYNHVRNYVTQKPYKQEKYRLYFNTPTLANGWSKNKEYDNNAIILMRDDKYYLGILNAKKKPSKQTMAGKEDCLEHAYAKMNYYLLPGANKMLPKVFLSKKGIQDYHPSSYIVEGYNEKKHIKGSKNFDIRFCRDLIDYFKECIKKHPDWNKFNFEFSATETYEDISVFYREVEKQGYRVEWTYINSEDIQKLEEDGQLFLFQIYNKDFAVGSTGKPNLHTLYLKNLFSEENLRDIVLKLNGEAEIFFRKSSVQKPVIHKCGSILVNRTYEITESGTTRVQSIPESEYMELYRYFNSEKQIELSDEAKKYLDKVQCNKAKTDIVKDYRYTMDKFFIHLPITINFKVDKGNNVNAIAQQYIAEQEDLHVIGIDRGERNLIYVSVIDMYGRILEQKSFNLVEQVSSQGTKRYYDYKEKLQNREEERDKARKSWKTIGKIKELKEGYLSSVIHEIAQMVVKYNAIIAMEDLNYGFKRGRFKVERQVYQKFETMLISKLNYLADKSQAVDEPGGILRGYQMTYVPDNIKNVGRQCGIIFYVPAAYTSKIDPTTGFINAFKRDVVSTNDAKENFLMKFDSIQYDIEKGLFKFSFDYKNFATHKLTLAKTKWDVYTNGTRIQNMKVEGHWLSMEVELTTKMKELLDDSHIPYEEGQNILDDLREMKDITTIVNGILEIFWLTVQLRNSRIDNPDYDRIISPVLNNDGEFFDSDEYNSYIDAQKAPLPIDADANGAFCIALKGMYTANQIKENWVEGEKLPADCLKIEHASWLAFMQGERG

SEQ ID NO: 24 - protein, 1261 aa, synthetic construct
MNTSLFSSFTRQYPVTKTLRFELKPMGATLGHIQQKGFLHKDEELAKIYKKIKELLDEYHRAFIADTLGDAQLVGLDDFYADYQALKQDSKNSHLKDKLTKTQDNLRKQITKNFEKTPQLKERYKRLFTKELFKAGKDKGDLEKWLINHDSEPNKAEKISWIHQFENFTTYFQGFYENRKNMYSDEVKHTAIAYRLIHENLPRFVDNIQVLSKIKSDYPDLYHELNHLDSRTIDFADFKFDDMLQMDFYHHLLIQSGITAYNTLLGGKVLEGGKKLQGINELINLYGQKHKIKIAKLKPLHKQILSDGQSVSFLPKKFDNDYELCQTVNHFYREYVAIFDELVVLFQKFYDYDKDNIYINHQQLNQLSHELFADFRLLSRALDFYYCQIIDGDFNNKINNAKSQNAKEKLLKEKERYTKSNHSINELQKAINHYASHHEDTEVKVISDYFSATNIRNMIDGIHHHFSTIKGFLEKDNNQGESYLPKQKNSNDVKNLKLFLDGVLRLIHFIKPLALKSDDTLEKEEHFYGEFMPLYDKLVMFTLLYNKVRDYISQKPYNDEKIKLNFGNSTLLNGWDVNKEKDNFGVILCKEGLYYLAILDKSHKKVFDNAPKATSSHTYQKMVYKLLPGPNKMLPKVFFAKSNIGYYQPSAQLLENYEKGTHKKGSNFSLTDCHHLIDFFKSSIAKHPEWKEFGFRFSDTHTYQDLSDFYKEIEPQSYKVKFIDIDADYIDDLVEKGQLYLFQLYNKDFSKQSYGKPNLHTLYFKSLFSDDNLKNPIYKLNGEAEIFYRRASLSVSDTTIHQAGEILTPKNPNNTHNRTLSYDVIKNKRYTTDKFFLHIPITMNFGIENTGFKAFNHQVNTTLKNADKKDVHIIGIDRGERHLLYVSVIDGDGRIVEQRTLNDIVSISNNGMSMSTPYHQILDNREKERLAARTDWGDIKNIKELKAGYLSHVVHEVVQMMLKYNAMIVLEDLNFGFKHGRFKVEKQVYQNFENALIKKLNYLVLKNADNHQLGSVRKALQLTNNFTDIKSIGKQTGFIFYVPAWNTSKIDPTTGFVDLLKPRYENMAQAQSFISRFKKIAYNHQLDYFEFEFDYADFYQKTIDKKRIWTLCTYGDVRYYYDHKTKETKTVNITKELKSLLDKHDLSYQNGHNLVDELANSHDKSLLSGVMYLLKVLLALRYSHAQKNEDFILSPVMNKDGVFFDSRFADDVLPNNADANGAYHIALKGLWVLNQIQSADNMDKIDLSISNEQWLHFTQSR

SEQ ID NO: 25 - protein, 1288 aa, synthetic construct
MVGNKISNSFDSFTGINALSKTLRNELIPSDYTKRHIAESDFIAADTNKNEDQYVAKEMMDDYYRDFISKVLDNLHDIEWKNLFELMHKAKIDKSDATSKELIKIQDMLRKKIGKKFSQDPEYKVMLSAGMITKILPKYILEKYETDREDRLEAIKRFYGFTVYFKEFWASRQNVFSDKAIASSISYRIIHENAKIYMDNLDAYNRIKQIACEEIEKIEEEAYDFLQGDQLDVVYTEEAYGRFISQSGIDLYNNICGVINAHMNLYCQSKKCSRSKFKMQKLHKQILCKAETGFEIPLGFQDDAQVINAINSFNALIKEKNIISRLRTIGKSISLYDVNKIYISSKAFENVSVYIDHKWDVIASSLYKYFSEIVKGNKDNREEKIQKEIKKVKSCSLGDLQRLVNSYYKIDSTCLEHEVTEFVTKIIDEIDNFQITDFKFNDKISLIQNEQIVMDIKTYLDKYMSIYHWMKSFVIDELVDKDMEFYSELDELNEDMSEIVNLYNKVRNYVTQKPYSQEKIKLNFGSPTLADGWSKSKEFDNNAIILIRDEKIYLAIFNPRNKPAKTVISGHDVCNSETDYKKMNYYLLPGASKTLPHVFIKSRLWNESHGIPDEILRGYELGKHLKSSVNFDVEFCWKLIDYYKECISCYPNYKAYNFKFADTESYNDISEFYREVECQGYKIDWTYISSEDVEQLDRDGQIYLFQIYNKDFAPNSKGMDNLHTKYLKNIFSEDNLKNIVIKLNGEAELFYRKSSVKKKVEHKKGTILVNKTYKVEDNTENSKEKRVIIESVPDDCYMELVDYWRNGGIGILSDKAVQYKDKVSHYEATMDIVKDRRYTVDKFFIHLPITINFKADGRININEKVLKYIAENDELHVIGIDRGERNLLYVSVINKKGKIVEQKSFNMIESYETVTNIVRRYNYKDKLVNKESARTDARKNWKEIGKIKEIKEGYLSQVIHEISKMVLKYNAIIVMEDLNYGFKRGRFRVERQVYQKFENMLISKLAYLVDKSRKADEPGGVLRGYQLTYIPDSLEKLGSQCGIIFYVPAAYTSKIDPLTGFVNVFNFREYSNFETKLDFVRSLDSIRYDTEKKLFSISFDYDNFKTHNTTLAKTKWVIYLRGERIKKEHTSYGWKDDVWNVESRIKDLFDSSHMKYDDGHNLIEDILELESSVQKKLINELIEIIRLTVQLRNSKSERYDRTEAEYDRIVSPVMDENGRFYDSENYIFNEETELPKDADANGAYCIALKGLYNVIAIKNNWKEGEKFNRKLLSLNNYNWFDFIQNRRF

SEQ ID NO: 26 - protein, 1876 aa, synthetic construct
MVGNKISNSFDSFTGINALSKTLRNELIPSDYTKRHIAESDFIAADTNKNEDQYVAKEMMDDYYRDFISKVLDNLHDIEWKNLFELMHKAKIDKSDATSKELIKIQDMLRKKIGKKFSQDPEYKVMLSAGMITKILPKYILEKYETDREDRLEAIKRFYGFTVYFKEFWASRQNVFSDKAIASSISYRIIHENAKIYMDNLDAYNRIKQIACEEIEKIEEEAYDFLQGDQLDVVYTEEAYGRFISQSGIDLYNNICGVINAHMNLYCQSKKCSRSKFKMQKLHKQILCKAETGFEIPLGFQDDAQVINAINSFNALIKEKNIISRLRTIGKSISLYDVNKIYISSKAFENVSVYIDHKWDVIASSLYKYFSEIVKGNKDNREEKIQKEIKKVKSCSLGDLQRLVNSYYKIDSTCLEHEVTEFVTKIIDEIDNFQITDFKFNDKISLIQNEQIVMDIKTYLDKYMSIYHWMKSFVIDELVDKDMEFYSELDELNEDMSEIVNLYNKVRNYVTQKPYSQEKIKLNFGSPTLADGWSKSKEFDNNAIILIRDEKIYLAIFNPRNKPAKTVISGHDVCNSETDYKKMNYYLLPGASKTLPHVFIKSRLWNESHGIPDEILRGYELGKHLKSSVNFDVEFCWKLIDYYKECISCYPNYKAYNFKFADTESYNDISEFYREVECQGYKIDWTYISSEDVEQLDRDGQIYLFQIYNKDFAPNSKGMDNLHTKYLKNIFSEDNLKNIVIKLNGEAELFYRKSSVKKKVEHKKGTILVNKTYKVEDNTENSKEKRVIIESVPDDCYMELVDYWRNGGIGILSDKAVQYKDKVSHYEATMDIVKDRRYTVDKFFIHLPITINFKADGRININEKVLKYIAENDELHVIGIDRGERNLLYVSVINKKGKIVEQKSFNMIESYETVTNIVRRYNYKDKLVNKESARTDARKNWKEIGKIKEIKEGYLSQVIHEISKMVLKYNAIIVMEDLNYGFKRGRFRVERQVYQKFENMLISKLAYLVDKSRKADEPGGVLRGYQLTYIPDSLEKLGSQCGIIFYVPAAYTSKIDPLTGFVNVFNFREYSNFETKLDFVRSLDSIRYDTEKKLFSISFDYDNFKTHNTTLAKTKWVIYLRGERIKKEHTSYGWKDDVWNVESRIKDLFDSSHMKYDDGHNLIEDILELESSVQKKLINELIEIIRLTVQLRNSKSERYDRTEAEYDRIVSPVMDENGRFYDSENYIFNEETELPKDADANGAYCIALKGLYNVIAIKNNWKEGEKFNRKLLSLNNYNWFDFIQNRRFQIYLFQIYNKDFAPNSKGMDNLHTKYLKNIFSEDNLKNIVIKLNGEAELFYRKSSVKKKVEHKKGTILVNKTYKVEDNTENSKEKRVIIESVPDDCYMELVDYWRNGGIGILSDKAVQYKDKVSHYEATMDIVKDRRYTVDKFFIHLPITINFKADGRININEKVLKYIAENDELHVIGIDRGERNLLYVSVINKKGKIVEQKSFNMIESYETVTNIVRRYNYKDKLVNKESARTDARKNWKEIGKIKEIKEGYLSQVIHEISKMVLKYNAIIVMEDLNYGFKRGRFRVERQVYQKFENMLISKLAYLVDKSRKADEPGGVLRGYQLTYIPDSLEKLGSQCGIIFYVPAAYTSKIDPLTGFVNVFNFREYSNFETKLDFVRSLDSIRYDTEKRLFSISFDYDNFKTHNTTLAKTKWVIYLRGERIKKEHTSYGWKDDVWNVESRIKDLFDSSHMKYDDGHNLIEDILELESSVQKKLINELIEIIRLTVQLRNSKSERYDRTEAEYDRIVSPVMDEKGRFYDSENYIFNEETELPKDADANGAYCIALKGLYNVIAIKNNWKEGEKFNRKLLSLNNYNWFDFIQNRRF

SEQ ID NO: 27 - protein, 1245 aa, synthetic construct
MQEHKKISHLTHRNSVQKTIRMQLNPVGKTMDYFQAKQILENDEKLKEDYQKIKEIADRFYRNLNEDVLSKTGLDKLKDYAEIYYHCNTDADRKRLDECASELRKEIVKNFKNRDEYNKLFNKKMIEIVLPQHLKNEDEKEVVASFKNFTTYFTGFFTNRKNMYSDGEESTAIAYRCINENLPKHLDNVKAFEKAISKLSKNAVDDLDTTYSGLCGTNLYDVFTVDYFNFLLPQSGITEYNKIIGGYTTSDGTKVKGINEYINLYNQQVSKRYKIPNLKILYKQILSESEKVSFIPPKFEDDNELLSAVSEFYANDETFDGMPLKKAIDETKLLFGNLDNSSLNGIYIQNDRSVTNLSNSMFGSWSVIEDLWNKNYDSVNSNSRIKDIQKREDKRKKAYKAEKKLSLSFLQVLISNSENDEIREKSIVDYYKTSLMQLTDNLSDKYKEAAPLFNESYANEKGLKNDDKSISLIKNFLDAIKEIEKFIKPLSETNITGEKNDLFYSQFTPLLDNISRIDILYDKVRNYVTQKPFSTDKIKLNFGNSQLLNGWDRNKEKDCGAVWLCKDEKYYLAIIDKSNNSILENIDFQDCDESDCYEKIIYKLLPGPNKMLPKVFFSEKCKKLLSPSDEILKIRKNGTFKKGDKFSLDDCHKLIDFYKESFKKYPNWLIYNFKFKKTNEYNDISEFYNDVASQGYNISKMKIPTSFIDKLVDEGKIYLFQLYNKDFSPHSKGTPNLHTLYFKMLFDERNLEDVVYKLNGEAEMFYRPASIKYDKPTHPKNTPIKNKNTLNDKRASTFPYDLIKDKRYTKWQFSLHFPITMNFKAPDRAMINDDVRNLLKSCNNNFIIGIDRGERNLLYVSIIDSNGAIIYQHSLNIIGNKFKGKTYETNYREKLETREKERTEQRRNWKAIESIKELKEGYISQAVHVICQLVVKYDAIIVMEKLTDGFKRGRTKFEKQVYQKFEKMLIDKLNYYVDKKLDPDEEGGLLHAYQLTNKLESFDKLGMQSGFIFYVRPDFTSKIDPVTGFVNLLYPRYENIDKAKDMISRFDDIRYNAGEDFFEFDIDYDKFPKTASDYRKKWTICTNGERIEAFRNPASNNEWSYRTIILAEKFKELFDNNSINYRDSDNLKAEILSQTKGKFFEDFFKLLRLTLQMRNSNPETGEDRILSPVKDKNGNFYDSSKYDEKSNLPCDADANGAYNIARKGLWIVEQFKKSDNVSTVEPVIHNDKWLKFVQENDMANN

SEQ ID NO: 28 - protein, 1271 aa, synthetic construct
MKNLANFTNLYSLQKTLRFELKPIGKTLDWIIKKDLLKQDEILAEDYKIVKKIIDRYHKDFIDLAFESAYLQKKSSDSFTAIMEASIQSYSELYFIKEKSDRDKKAMEEISGIMRKEIVECFTGKYSEVVKKKFGNLFKKELIKEDLLNFCEPDELPIIQKFADFTTYFTGFHENRENMYSNEEKATAIANRLIRENLPRYLDNLRIIRSIQGRYKDFGWKDLESNLKRIDKNLQYSDFLTENGFVYTFSQKGIDRYNLILGGQSVESGEKIQGLNELINLYRQKNQLDRRQLPNLKELYKQILSDRTRHSFVPEKFSSDKALLRSLLDFHKEVIQNKNLFEEKQVSLLQAIRETLTDLKSFDLDRIYLTNDTSLTQISNFVFGDWSKVKTILAIYFDENIANPKDRQRQSNSYLKAKENWLKKNYYSIHELNEAISVYGKHSDEELPNTKIEDYFSGLQTKDETKKPIDVLDAIVSKYADLESLLTKEYPEDKNLKSDKGSIEKIKNYLDSIKLLQNFLKPLKPKKVQDEKDLGFYNDLELYLESLESANSLYNKVRNYLTGKEYSDEKIKLNFKNSTLLDGWDENKETSNLSVIFRDTNNYYLGILDKQNNRIFESIPEIQSGEETIQKMVYKLLPGANNMLPKVFFSEKGLLKFNPSDEITSLYSEGRFKKGDKFSINSLHTLIDFYKKSLAVHEDWSVFNFKFDETSHYEDISQFYRQVESQGYKITFKPISKKYIDTLVEDGKLYLFQIYNKDFSQNKKGGGKPNLHTIYFKSLFEKENLKDVIVKLNGQAEVFFRKKSIHYDENITRYGHHSELLKGRFSYPILKDKRFTEDKFQFHFPITLNFKSGEIKQFNARVNSYLKHNKDVKIIGIDRGERHLLYLSLIDQDGKILRQESLNLIKNDQNFKAINYQEKLHKKEIERDQARKSWGSIENIKELKEGYLSQVVHTISKLMVEHNAIVVLEDLNFGFKRGRQKVERQVYQKFEKMLIEKLNFLVFKDKEMDEPGGILKAYQLTDNFVSFEKMGKQTGFVFYVPAWNTSKIDPKTGFVNFLHLNYENVNQAKELIGKFDQIRYNQDRDWFEFQVTTDQFFTKENAPDTRTWIICSTPTKRFYSKRTVNGSVSTIEIDVNQKLKELFNDCNYQDGEDLVDRILEKDSKDFFSKLIAYLRILTSLRQNNGEQGFEERDFILSPVVGSDGKFFNSLDASSQEPKDADANGAYHIALKGLMNLHVINETDDESLGKPSWKISNKDWLNFVWQRPSLKA

SEQ ID NO: 29 - protein, 1245 aa, synthetic construct
MQEHKKISHLTHRNSVQKTIRMQLNPVGKTMDYFQAKQILENDEKLKENYQKIKEIADRFYRNLNEDVLSKTRLDKLKDYTDIYYHCNTDADRKRLDECASELRKEIVKNFKNRDEYNKLFNKKMIEIVLPKHLKNEDEKEVVTSFKNFTTYFTGFFTNRKNMYSDGEESTAIAYRCINENLPKHLDNVKAFEKAISKLSKNAIDDLDTTYSGLCGTNLYDVFTVDYFNFLLPQSGITEYNKIIGGYTTNDGTKVKGINEYINLYNQQVSKRDKIPNLKILYKQILSESEKVSFIPPKFEDDNELLSAVSEFYANDETFDGMPLKKAIDETKLLFGNLDNPSLNGIYIQNDRSVTNLSNSMFGSWSVIEDLWNKNYDSVNSNSRIKDIQKREDKRKKAYKAEKKLSLSFLQVLISNSENDEIREKSIVDYYKTSLMQLTDNLSDKYNEAAPLLNENYSNEKGLKNDDKSISLIKNFLDAIKEIEKFIKPLSETNITGEKNDLFYSQFTPLLDNISRIDILYDKVRNYVTQKPFSTDKIKLNFGNSQLLNGWDRNKEKDCGAVWLCKDEKYYLAIIDKSNNSILENIDFQDCDESDCYEKIIYKLLPGPNKMLPKVFFSEKCKKLLSPSDEILKIYKSGTFKTGDKFSLDDCHKLIDFYKESFKKYPNWLIYNFKFKKTNEYNDIREFYNDVALQGYNISKMKIPTSFIDKLVDEGKIYLFQLYNKDFSPHSKGTPNLHTLYFKMLFDERNLEDVVYRLNGEAEMFYRPASIKYDKPTHPKNTPIKNKNTLNDKKTSTFPYDLIKDKRYTKWQFSLHFPITMNFKAPDKAMINDDVRNLLKSCNNNFIIGIDRGERNLLYVSVIDSNGAIIYQHSLNIIGNKFKEKTYETNYREKLATREKERTEQRRNWKAIESIKELKEGYISQAVHVICQLVVKYDAIIVMEKLTDGFKRGRTKFEKQVYQKFEKMLIDKLNYYVDKKLDPDEEGGLLHAYQLTNKLESFDKLGMQSGFIFYVRPDFTSKIDPVTGFVNLLYPQYENIDKAKDMISRFDEIRYNAGEDFFEFDIDYDEFPKTASDYRKKWTICTNGERIEAFRNPANNNEWSYRTIILAEKFKELFDNNSINYRDSDDLKAEILSQTKGKFFEDFFKLLRLTLQMRNSNPETGEDRILSPVKDKNGNFYDSSKYDEKSKLPCDADANGAYNIARKGLWIVEQFKKADNVSTVEPVIHNDQWLKFVQENDMANN

SEQ ID NO: 30 - protein, 1245 aa, synthetic construct
MQEHKKISHLTHRNSVQKTIRMQLNPVGKTMDYFQAKQILENDEKLKEDYQKIKEIADRFYRNLNEDVLSKTGLDKLKDYADIYYHCNTDADRKRLNECASELRKEIVKNFKNRDEYNKLFNKKMIEIVLPKHLKNEDEKEVVASFKNFTTYFTGFFTNRKNMYSDGEESTAIAYRCINENLPKHLDNVKVFEKAISKLSKNAIDDLGATYSGLCGTNLYDVFTVDYFNFLLPQSGITEYNKIIGGYTTSDGTKVKGINEYINLYNQQVSKRDKIPNLKILYKQILSESEKVSFIPPKFEDDNELLSAVSEFYANDETFDGMPLKKAIDETKLLFGNLDNSSLNGIYIQNDRSVTNLSNSMFGSWSVIEDLWNKNYDSVNSNSRIKDIQKREDKRKKAYKAEKKLSLSFLQVLISNSENDEIREKSIVDYYKTSLMQLTDNLSDKYKEAAPLFSENYDNEKGLKNDDKSISLIKNFLDAIKEIEKFIKPLSETNITGEKNDLFYSQFTPLLDNISRIDILYDKVRNYVTQKPFSTDKIKLNFGNSQLLNGWDKDKEREYGAVLLCKDEKYYLAIIDKSNNSILENIDFQDCNESDYYEKIVYKLLTKINGNLPRVFFSEKRKKLLSPSDEILKIYKSGTFKKGDKFSLDDCHKLIDFYKESFKKYPNWLIYNFKFKNTNEYNDISEFYNDVASQGYNISKMKIPTTFIDKLVDEGKIYLFQLYNKDFSPHSKGTPNLHTLYFKMLFDERNLEDVVYKLNGEAEMFYRPASIKYDKPTHPKNTPIKNKNTLNDKKASTFPYDLIKDKRYTKWQFSLHFPITMNFKAPDKAMINDDVRNLLKSCNNNFIIGIDRGERNLLYVSVIDSNGAIIYQHSLNIIGNKFKGKTYETNYREKLATREKDRTEQRRNWKAIESIKELKEGYISQAVHVICQLVVKYDAIIVMEKLTDGFKRGRTKFEKQVYQKFEKMLIDKLNYYVDKKLDPDEEGGLLHAYQLTNKLESFDKLGTQSGFIFYVRPDFTSKIDPVTGFVNLLYPRYENIDKAKDMISRFDDIRYNAGEDFFEFDIDYDKFPKTASDYRKKWTICTNGERIEAFRNPANNNEWSYRTIILAEKFKELFDNNSINYRDSDDLKAEILSQTKGKFFEDFFKLLRLTLQMRNSNPETGEDRILSPVKDKNGNFYDSSKYDEKSKLPCDADANGAYNIARKGLWIVEQFKKADNVSTVEPVIHNDKWLKFVQENDMANN

SEQ ID NO: 31 - protein, 1244 aa, synthetic construct
MQERKKISHLTHRNSVKKTIRMQLNPVGKTMDYFQAKQILENDEKLKENYQKIKEIADRFYRNLNEDVLSKTGLDKLKDYAEIYYHCNTDADRKRLNKCASELRKEIVKNFKNRDEYNKLFDKRMIEIVLPKHLKNEDEKEVVASFKNFTTYFTGFFTNRKNMYSDGEESTAIAYRCINENLPKHLDNVKAFEKAISKLSKNAIDDLDAYSGLCGTNLYDVFTVDYFNFLLPQSGITEYNKIIGGYTTNDGTKVKGINEYINLYNQQVSKRDKIPNLQILYKQILSESEKVSFIPPKFEDDNELLSAVSEFYANDETFDGMPLKKAIDETKLLFGNLDNSSLNGIYIQNDRSVTNLSNSMFGSWSVIEDLWNKNYDSVNSNSRIKDIQKREDKRKKAYKAEKKLSLSFLQVLISNSENDEIRKKSIVDYYKTSLMQLTDNLSDKYNEAAPLLNENYSNEKGLKNDDKSISLIKNFLDAIKEIEKFIKPLSETNITGEKNDLFYSQFTPLLDNISRIDILYDKVRNYVTQKPFSTDKIKLNFGNYQLLNGWDKDKEREYGAVLLCKDEKYYLAIIDKSNNRILENIDFQDCDESDCYEKIIYKLLPTPNKMLPKVFFAKKHKKLLSPSDEILKIYKNGTFKKGDKFSLDDCHKLIDFYKESFKKYPKWLIYNFKFKKTNGYNDIREFYNDVALQGYNISKMKIPTSFIDKLVDEGKIYLFQLYNKDFSPHSKGTPNLHTLYFKMLFDERNLEDVVYRLNGEAEMFYRPASIKYDKPTHPKNTPIKNKNTLNDKRASTFPYDLIKDKRYTKWQFSLHFPITMNFKDPDKAMINDDVRNLLKSCNNNFIIGIDRGERNLLYVSVINSNGAIIYQHSLNIIGNKFKGKTYETNYREKLATREKDRTEQRRNWKAIESIKELKEGYISQAVHVICQLVVKYDAIIVMEKLTDGFKRGRTKFEKQVYQKFEKMLIDKLNYYVDKKLDPDEEGGLLHAYQLTNKLESFDKLGTQSGFIFYVRPDFTSKIDPVTGFVNLLYPRYEKIDKAKDMISRFDDIRYNAGEDFFEFDIDYDKFPKTASDYRKKWTICTNGERIEAFRNPANNNEWSYRTIILAEKFKELFDNNSINYRDSDDLKAEILSQTKGKFFEDFFKLLRLTLQMRNSNPETGEDRILSPVKDKNGNFYDSSKYDEKSKLPCDADANGAYNIARKGLWIVEQFKKADNVSTVEPVIHNDKWLKFVQENDMANN

SEQ ID NO: 32 - protein, 1175 aa, synthetic construct
KTGLDKLKDYAEIYYHCNTDADRKRLNKCASELRKEIVKNFKNRDEYNKLFDKRMIEIVLPKHLKNEDEKEVVASFKNFTTYFTGFFTNRKNMYSDGEESTAIAYRCINENLPKHLDNVKAFEKAISKLSKNAIDDLDATYSGLCGTNLYDVFTVDYFNFLLPQSGITEYNKIIGGYTTSDGTKVKGINEYINLYNQQVSKRDKIPNLQILYKQILSESEKVSFIPPKFEDDNELLSAVSEFYANDETFDEMPLKKAIDETKLLFGNLDNSSLNGIYIQNDRSVTNLSNSMFGSWSVIEDLWNKNYDSVNSNSRIKDIQKREDKRKKAYKAEKKLSLSFLQVLISNSENNEIREKSIVDYYKTSLMQLTDNLSDKYNEVAPLLNENYSNEKGLKNDDKSISLIKNFLDAIKEIEKFIKPLSETNITGEKNDLFYSQFTPLLDNISRIDILYDKVRNYVTQKPFSTDKIKLNFGNYQLLNGWDKDKEREYGAVLLCRDEKYYLAIIDKSNNRILENIDFQDCDESDCYEKIIYKLLPTPNKMLPKVFFAKKHKKLLSPSDEILKIRKNGTFKKGDKFSLDDCHKLIDFYKESFKKYPNWLIYNFKFKKTNEYNDIREFYNDVALQGYNISKMKIPTSFIDKLVDEGKIYLFQLYNKDFSPHSKGTPNLHTLYFKMLFDERNLEDVVYKLNGEAKMFYRPASIKYDKPTHPKNTPIKNKNTLNDKKASTFPYDLIKDKRYTKWQFSLHFSITMNFKAPDKAMINDDVRNLLKSCNNNFIIGIDRGERNLLYVSVIDSNGAIIYQHSLNIIGNKFKGKTYETNYREKLATREKERTEQRRNWKAIESIKELKEGYISQAVHVICQLVVKYDAIIVMEKLTDGFKRGRTKFEKQVYQKFEKMLIDKLNYYVDKKLDPDEEGGLLHAYQLTNKLESFDKLGTQSGFIFYVRPDFTSKIDPVTGFVNLLYPRYENIDKAKDMISRFDDIRYNAGEDFFEFDIDYDKFPKTASDYRKKWTICTNGERIEAFRNPANNNEWSYRTIILAEKFKELFDNNSINYRDSDDLKAEILSQTKGKFFEDFFKLLRLTLQMRNSNPETGEDRILSPVKDKNGNFYDSSKYDEKSKLPCDADANGAYNIARKGLWIVEQFKKSDNVSTVEPVIHNDKWLKFVQENDMANN

SEQ ID NO: 33 - protein, 1278 aa, synthetic construct
MSININKFSDECRKIDFFTDLYNIQKTLRFSLIPIGATADNFEFKGRLSKEKDLLDSAKRIKEYISKYLADESDICLSQPVKLKHLDEYYELYITKDRDEQKFKSVEEKLRKELADLLKEILKRLNKKILSDYLPEYLEDDEKALEDIANLSSFSTYFNSYYDNCKNMYTDKEQSTAIPYRCINDNLPKFIDNMKAYEKALEELKPSDLEELRNNFKGVYDTTVDDMFTLDYFNCVLSQSGIDSYNAIIGNDKVKGINEYINLHNQTAEQGHKVPNLKRLYKQIGSQKKTISFLPSKFESDNELLKAVYDFYNTGDAEKNFTALKDTITEFEKIFDNLSEYNLDGVFVRNDISLTNLSQSMFNDWSVFRNLWNDQYDKVNNPEKAKDIDKYNDKRHKVYKKSESFSINQLQELIATTLEEDINSKKITDYFSCDFHRVTTEVENKYQLVKDLLSSDYPKNKNLKTSEEDVALIKDFLDSVKSLESFVKILTGTGKESGKDELFYGSFTKWFDQLRYIDKLYDKVRNYITEKPYSLDKIKLSFDNPQFLGGWQHSKETDYSAQLFMKDGLYYLGVMDKETKREFKTQYNTPENDSDTMVKIEYNQIPNPGRVIQNLMLVDGKIVKKNGRKNADGVNAVLEELKNQYLPENINRIRKTESYKTTSNNFNKDDLKAYLEYYIARTKEYYCKYNFVFKSADEYGSFNEFVDDVNNQAYQITKVKVSEKQLLSLVEQGKLYLFKIYNKDFSEYSKGKKNLHTMYFQMLFDDRNLENLVYKLQGGAEMFYRPASIKKDSEFKHDANVEIIKRTCEDKVNDKDNPTDDEKAKYYSKFDYDIVKNKRFTKDQFSLHLTLAMNCNQPDHYWLNNDVRELLKKSNKNHIIGIDRGERNLIYVTIINSDGVIVDQINFNIIENSYNGKKYKTDYQKKLNQREEDRQKARKTWKTIETIKELKDGYISQVVHQICKLIVQYDAIVVMENLNGGFKRGRTKVEKQVYQKFETMLINKLNYYVDKGTDYKECGGLLKAYQLTNKFETFERIGKQSGIIFYVDPYLTSKIDPVTGFANLLYPKYETIPKTHNFISNIDDIRYNQSEDYFEFDIDYDKFPQGSYNYRKKWTICSYGNRIKYYKDSRNKTASVVVDITEKFKETFTNAGIDFVNDNIKEKLLLVNSKELLKSFMDTLKLTVQLRNSEINSDVDYIISPIKDRNGNFYYSENYKKSNNEVPSQPQDGDANGAYNIARKGLMIINKLKKADDVTNNELLKISKKEWLEFAQKGDLGE

SEQ ID NO: 34 - protein, 1562 aa, synthetic construct
MKATSIWDNFTRKYSVSKTLRFELRPVGKTEENIVKKEIIDAEWISGKNIPKGTDADRARDYKIVKKLLNQLHILFINQALSSENVKEFEKEDKKSKTFVAWSDLLATHFDNWIQYTRDKSNSTVLKSLEKSKKDLYSKLGKLLNSKANAWKAEFISYHKIKSPDNIKIRLSASNVQILFGNTSDPIQLLKYQIELDNIKFLKDDGSEYTTKELADLLSTFEKFGTYFSGFNQNRANVYDIDGEISTSIAYRLFNQNIEFFFQNIKRWEQFTSSIGHKEAKENLKLVQWDIQSKLKELDMEIVQPRFNLKFEKLLTPQSFIYLLNQEGIDAFNTVLGGIPAEVKAEKKQGVNELINLTRQKLNEDKRKFPSLQIMYKQIMSERKTNFIDQYEDDVEMLKEIQEFSNDWNEKKKRHSASSKEIKESAIAYIQREFHETFDSLEERATVKEDFYLSEKSIQNLSIDIFGGYNTIHNLWYTEVEGMLKSGERPLTRVEKEKLKKQEYISFAQIERLISKHSQQYLDSTPKEANDRSLFKEKWKKTFKNGFKVSEYTNLKLNELISEGETFQKIDQETGKETTIKIPGLFESYENAILVESIKNQSLGTNKKESVPSIKEYLDSCLRLSKFIESFLVNSKDLKEDQSLDGCSDFQNTLTQWLNEEFDVFILYNKVRNHVTKKPGNTDKIKINFDNATLLDGWDVDKEAANFGFLLKKADNYYLGIADSSFNQDLKYFNEGERLDEIEKNRKNLEKEESKNISKIDQEKVKKYKEVIDDLKAISNLNKGRYSKAFYKQSKFTTLIPKCTTQLNEVIEHFKKFDTDYRIENKKFAKPFIITKEVFLLNNTVYDTATKKFTLKIGEDEDTKGLKKFQIGYYRATDDKKGYESALRNWITFCIEFTKSYKSCLNYNYSSLKSVSEYKSLDEFYKDLNGIGYTIDFVDISEEYINKKINEGKLYLFQIYNKDFSEKSKGKENLHTTYWKLLFDSKNLEDVVIKLNGQAEVFFRPASIHEKEKITHFKNQEIQNKNPNAVKKTSKFEYDIIKDNRFTKNKFLFHCPITLNFKADGNPYVNNEVQENIAKNPNVNIIGIDRGEKHLLYFTVINQQGQILDAGSLNSIKSEYKDKNQQSVSFETPYHKILDKKESERKEARESWQEIENIKELKAGYLSHVVHQLSNLIVKYNAIVVLEDLNKGFKRGRFKVEKQVYQKFEKSLIEKLNYLVFKDRKESNEPGHHLNAYQLTNKFLSFERLGKQSGVLFYATASYTSKVDPVTGFMQNIYDPYHKEKTREFYKNFTKIVYNGNYFEFNYDLNSVKPDSEEKRYRTNWTVCSCVIRSEYDSNSKTQKTYNVNDQLVKLFEDAKIKIENGNDLKSTILEQDDKFIRDLHFYFIAIQKMRVVDSKIEKGEDSNDYIQSPVYPFYCSKEIQPNKKGFYELPSNGDSNGAYNIARKGIVILDKIRLRVQIEKLFEDGTKIDWQKLPNLISKVKDKKLLMTVFEEWAELTHQGEVQQGDLLGKKMSKKGEQFAEFIKGLNVTKEDWEIYTQNEKVVQKQIKTWKLFSNST

SEQ ID NO: 35 - protein, 1742 aa, synthetic construct
MKAINEYYKQLGAYCREEGKEKDDFFKRIDGAYCAISHLFFGEHGEIAQSDSDVELIQKLLEAYKGLQRFIKPLLGHGDEADKDNEFDAKLRKVWDELDIITPLYDKVRNWLSRKIYNPEKIKLCFENNGKLLSGWVDSRTKSDNGTQYGGYIFRKKNEIGEYDFYLGISADTKLFRRDAAISYDDGMYERLDYYQLKSKTLLGNSYVGDYGLDSMNLLSAFKNAAVKFQFEKEVVPKDKENVPKYLKRLKLDYAGFYQILMNDDKVVDAYKIMKQHILATLTSSIRVPAAIELATQKELGIDELIDEIMNLPSKSFGYFPIVTAAIEEANKRENKPLFLFKMSNKDLSYAATASKGLRKGRGTENLHSMYLKALLGMTQSVFDIGSGMVFFRHQTKGLAETTARHKANEFVANKNKLNDKKKSIFGYEIVKNKRFTVDKYLFKLSMNLNYSQPNNNKIDVNSKVREIISNGGIKNIIGIDRGERNLLYLSLIDLKGNIVMQKSLNILKDDHNAKETDYKGLLTEREGENKEARRNWKKIANIKDLKRGYLSQVVHIISKMMVEYNAIVVLEDLNPGFIRGRQKIERNVYEQFERMLIDKLNFYVDKHKGANETGGLLHALQLTSEFKNFKKSEHQNGCLFYIPAWNTSKIDPATGFVNLFNTKYTNAVEAQEFFSKFDEIRYNEEKDWFEFEFDYDKFTQKAHGTRTKWTLCTYGMRLRSFKNSAKQYNWDSEVVALTEEFKRILGEAGIDIHENLKDAICNLEGKSQKYLEPLMQFMKLLLQLRNSKAGTDEDYILSPVADENGIFYDSRSCGDQLPENADANGAYNIARKGLMLIEQIKNAEDLNNVKFDISNKAWLNFAQQKPYKNGMKAINEYYKQLGAYCREEGKEKDDFFKRIDGAYCAISHLFFGEHGEIAQSDSDVELIQKLLEAYKGLQRFIKPLLGHGDEADKDNEFDAKLRKVWDELDIITPLYDKVRNWLSRKIYNPEKIKLCFENNGKLLSGWVDSRTKSDNGTQYGGYIFRKKNEIGEYDFYLGISADTKLFRRDAAISYDDGMYERLDYYQLKSKTLLGNSYVGDYGLDSMNLLSAFKNAAVKFQFEKEVVPKDKENVPKYLKRLKLDYAGFYQILMNDDKVVDAYKIMKQHILATLTSSIRVPAAIELATQKELGIDELIDEIMNLPSKSFGYFPIVTAAIEEANKRENKPLFLFKMSNKDLSYAATASKGLRKGRGTENLHSMYLKALLGMTQSVFDIGSGMVFFRHQTKGLAETTARHKANEFVANKNKLNDKKKSIFGYEIVKNKRFTVDKYLFKLSMNLNYSQPNNNKIDVNSKVREIISNGGIKNIIGIDRGERNLLYLSLIDLKGNIVMQKSLNILKDDHNAKETDYKGLLTEREGENKEARRNWKKIANIKDLKRGYLSQVVHIISKMMVEYNAIVVLEDLNPGFIRGRQKIERNVYEQFERMLIDKLNFYVDKHKGANETGGLLHALQLTSEFKNFKKSEHQNGCLFYIPAWNTSKIDPATGFVNLFNTKYTNAVEAQEFFSKFDEIRYNEEKDWFEFEFDYDKFTQKAHGTRTKWTLCTYGMRLRSFKNSAKQYNWDSEVVALTEEFKRILGEAGIDIHENLKDAICNLEGKSQKYLEPLMQFMKLLLQLRNSKAGTDEDYILSPVADENGIFYDSRSCGDQLPENADANGAYNIARKGLMLIEQIKNAEDLNNVKFDISNKAWLNFAQQKPYKNG

SEQ ID NO: 36 - protein, 1205 aa, synthetic construct
MYYQGLTKLYPISKTIRNELIPVGKTLEHIRMNNILEADIQRKSDYERVKKLMDDYHKQLINESLQDVHLSYVEEAADLYLNASKDKDIVDKFSKCQDKLRKEIVNLLKSHENFPKIGNKEIIKLLQSLSDTEKDYNALDSFSKFYTYFTSYNEVRKNLYSDEEKSSTAAYRLINENLPKFLDNIKAYSIAKSAGVRAKELTEEEQDCLFMTETFERTLTQDGIDNYNELIGKLNFAINLYNQQNNKLKGFRKVPKMKELYKQILSEREASFVDEFVDDEALLTNVESFSAHIKEFLESDSLSRFAEVLEESGGEMVYIKNDTSKTTFSNIVFGSWNVIDERLAEEYDSANSKKKKDEKYYDKRHKELKKNKSYSVEKIVSLSTETEDVIGKYIEKLQADIIAIKETREVFEKVVLKEHDKNKSLRKNTKAIEAIKSFLDTIKDFERDIKLISGSEHEMEKNLAVYAEQENILSSIRNVDSLYNMSRNYLTQKPFSTEKFKLNFNRATLLNGWDKNKETDNLGILLVKEGKYYLGIMNTKANKSFVNPPKPKTDNVYHKVNYKLLPGPNKMLPKVFFAKSNLEYYKPSEDLLAKYQAGTHKKGENFSLEDCHSLISFFKDSLEKHPDWSEFGFKFSDTKKYDDLSGFYREVEKQGYKITYTDIDVEYIDSLVEKDELYFFQIYNKDFSPYSKGNYNLHTLYLTMLFDERNLRNVVYKLNGEAEVFYRPASIGKDELIIHKSGEEIKNKNPKRAIDKPTSTFEYDIVKDRRYTKDKFMLHIPVTMNFGVDETRRFNEVVNDAIRGDDKVRVIGIDRGERNLLYVVVVDSDGTILEQISLNSIINNEYSIETDYHKLLDEKEGDRDRARKNWTTIENIKELKEGYLSQVVNVIAKLVLKYDAIICLEDLNFGFKRGRQKVEKQVYQKFEKMLIDKLNYLVIDKSRSQENPEEVGHVLNALQLTSKFTSFKELGKQTGIIYYVPAYLTSKIDPTTGFANLFYVKYESVEKSKDFFNRFDSICFNKVAGYFEFSFDYKNFTDRACGMRSKWKVCTNGERIIKYRNEEKNSSFDDKVIVLTEEFKKLFNEYGIAFNDCMDLTDAINAIDDASFFRKLTKLFQQTLQMRNSSADGSRDYIISPVENDNGEFFNSEKCDKSKPKDADANGAFNIARKGLWVLEQLYNSSSGEKLNLAMTNAEWLEYAQQHTI

SEQ ID NO: 37 - protein, 1263 aa, unidentified
MNNGTNNFQNFIGISSLQKTLRNALIPTETTQQFIVKNGIIKEDELRGENRQILKDIMDDYYRGFISETLSSIDDIDWTSLFEKMEIQLKNGDNKDTLIKEQTEYRKAIHKKFANDDRFKNMFSAKLISDILPEFVIHNNNYSASEKEEKTQVIKLFSRFATSFKDYFKNRANCFSADDISSSSCHRIVNDNAEIFFSNALVYRRIVKSLSNDDINKISGDMKDSLKEMSLEEIYSYEKYGEFITQEGISFYNDICGKVNSFMNLYCQKNKENKNLYKLQKLHKQILCIADTSYEVPYKFESDEEVYQSVNGFLDNISSKHIVERLRKIGDNYNGYNLDKIYIVSKFYESVSQKTYRDWETINTALEIHYNNILPGNGKSKADKVKKAVKNDLQKSITEINELVSNYKLCSDDNIKAETYIHEISHILNNFEAQELKYNPEIHLVESELKASELKNVLDVIMNAFHWCSVFMTEELVDKDNNFYAELEEIYDEIYPVISLYNLVRNYVTQKPYSTKKIKLNFGIPTLADGWSKSKEYSNNAIILMRDNLYYLGIFNAKNKPDKKIIEGNTSENKGDYKKMIYNLLPGPNKMIPKVFLSSKTGVETYKPSAYILEGYKQNKHIKSSKDFDITFCHDLIDYFKNCIAIHPEWKNFGFDFSDTSTYEDISGFYREVELQGYKIDWTYISEKDIDLLQEKGQLYLFQIYNKDFSKKSTGNDNLHTMYLKNLFSEENLKDIVLKLNGEAEIFFRKSSIKNPIIHKKGSILVNRTYEAEEKDQFGNIQIVRKNIPENIYQELYKYFNDKSDKELSDEAAKLKNVVGHHEAATNIVKDYRYTYDKYFLHMPITINFKANKTGFINDRILQYIAKEKDLHVIGIDRGERNLIYVSVIDTCGNIVEQKSFNIVNGYDYQIKLKQQEGARQIARKEWKEIGKIKEIKEGYLSLVIHEISKMVIKYNAIIAMEDLSYGFKKGRFKVERQVYQKFETMLINKLNYLVFKDISITENGGLLKGYQLTYIPDKLKNVGHQCGCIFYVPAAYTSKIDPTTGFVNIFKFKDLTVDAKREFIKKFDSIRYDSEKNLFCFTFDYNNFITQNTVMSKSSWSVYTYGVRIKRRFVNGRFSNESDTIDITKDMEKTLEMTDINWRDGHDLRQDIIDYEIVQHIFEIFRLTVQMRNSLSELEDRDYDRLISPVLNENNIFYDSAKAGDALPKDADANGAYCIALKGLYEIKQITENWKEDGKFSRDKLKISNKDWFDFIQNKRYL

SEQ ID NO: 38 - protein, 1334 aa, unidentified
MSSLTKFTNKYSKQLTIKNELIPVGKTLENIKENGLIDGDEQLNENYQKAKIIVDDFLRDFINKALNNTQIGNWRELADALNKEDEDNIEKLQDKIRGIIVSKFETFDLFSSYSIKKDEKIIDDDNDVEEEELDLGKKTSSFKYIFKKNLFKLVLPSYLKTTNQDKLKIISSFDNFSTYFRGFFENRKNIFTKKPISTSIAYRIVHDNFPKFLDNIRCFNVWQTECPQLIVKADNYLKSKNVIAKDKSLANYFTVGAYDYFLSQNGIDFYNNIIGGLPAFAGHEKIQGLNEFINQECQKDSELKSKLKNRHAFKMAVLFKQILSDREKSFVIDEFESDAQVIDAVKNFYAEQCKDNNVIFNLLNLIKNIAFLSDDELDGIFIEGKYLSSVSQKLYSDWSKLRNDIEDSANSKQGNKELAKKIKTNKGDVEKAISKYEFSLSELNSIVHDNTKFSDLLSCTLHKVASEKLVKVNEGDWPKHLKNNEEKQKIKEPLDALLEIYNTLLIFNCKSFNKNGNFYVDYDRCINELSSVVYLYNKTRNYCTKKPYNTDKFKLNFNSPQLGEGFSKSKENDCLTLLFKKDDNYYVGIIRKGAKINFDDTQAIADNTDNCIFKMNYFLLKDAKKFIPKCSIQLKEVKAHFKKSEDDYILSDKEKFASPLVIKKSTFLLATAHVKGKKGNIKKFQKEYSKENPTEYRNSLNEWIAFCKEFLKTYKAATIFDITTLKKAEEYADIVEFYKDVDNLCYKLEFCPIKTSFIENLIDNGDLYLFRINNKDFSSKSTGTKNLHTLYLQAIFDERNLNNPTIMLNGGAELFYRKESIEQKNRITHKAGSILVNKVCKDGTSLDDKIRNEIYQYENKFIDTLSDEAKKVLPNVIKKEATHDITKDKRFTSDKFFFHCPLTINYKEGDTKQFNNEVLSFLRGNPDINIIGIDRGERNLIYVTVINQKGEILDSVSFNTVTNKSSKIEQTVDYEEKLAVREKERIEAKRSWDSISKIATLKEGYLSAIVHEICLLMIKHNAIVVLENLNAGFKRIRGGLSEKSVYQKFEKMLINKLNYFVSKKESDWNKPSGLLNGLQLSDQFESFEKLGIQSGFIFYVPAAYTSKIDPTTGFANVLNLSKVRNVDAIKSFFSNFNEISYSKKEALFKFSFDLDSLSKKGFSSFVKFSKSKWNVYTFGERIIKPKNKQGYREDKRINLTFEMKKLLNEYKVSFDLENNLIPNLTSANLKDTFWKELFFIFKTTLQLRNSVTNGKEDVLISPVKNAKGEFFVSGTHNKTLPQDCDANGAYHIALKGLMILERNNLVREEKDTKKIMAISNVDWFEYVQKRRGVL

SEQ ID NO: 39 - protein, 10 aa, unidentified
YLFQIYNKDF

SEQ ID NO: 40 - protein, 7 aa, synthetic construct
PKKKRKV

SEQ ID NO: 41 - protein, 16 aa, synthetic construct
KRPAATKKAGQAKKKK

SEQ ID NO: 42 - protein, 9 aa, synthetic construct
PAAKRVKLD

SEQ ID NO: 43 - protein, 11 aa, synthetic construct
RQRRNELKRSP

SEQ ID NO: 44 - protein, 38 aa, synthetic construct
NQSSNFGPMKGGNFGGRSSGPYGGGGQYFAKPRNQGGY

SEQ ID NO: 45 - protein, 42 aa, synthetic construct
RMRIZFKNKGKDTAELRRRRVEVSVELRKAKKDEQILKRRNV

SEQ ID NO: 46 - protein, 8 aa, synthetic construct
VSRKRPRP

SEQ ID NO: 47 - protein, 8 aa, synthetic construct
PPKKARED

SEQ ID NO: 48 - protein, 8 aa, synthetic construct
PQPKKKPL

SEQ ID NO: 49 - protein, 12 aa, synthetic construct
SALIKKKKKMAP

SEQ ID NO: 50 - protein, 5 aa, synthetic construct
DRLRR

SEQ ID NO: 51 - protein, 7 aa, synthetic construct
PKQKKRK

SEQ ID NO: 52 - protein, 10 aa, synthetic construct
RKLKKKIKKL

SEQ ID NO: 53 - protein, 10 aa, synthetic construct
REKKKFLKRR

SEQ ID NO: 54 - protein, 20 aa, synthetic construct
KRKGDEVDGVDEVAKKKSKK

SEQ ID NO: 55 - protein, 17 aa, synthetic construct
RKCLQAGMNLEARKTKK

SEQ ID NO: 56 - protein, 9 aa, synthetic construct
PAAKKKKLD

SEQ ID NO: 57 - RNA, 19 nt, synthetic construct
  source 1..19: mol_type = other RNA
taatttctactcttgtaga

SEQ ID NO: 58 - RNA, 15 nt, synthetic construct
  source 1..15: mol_type = other RNA
atctacaacagtaga

SEQ ID NO: 59 - RNA, 15 nt, synthetic construct
  source 1..15: mol_type = other RNA
atctacaaaagtaga

SEQ ID NO: 60 - RNA, 20 nt, synthetic construct
  source 1..20: mol_type = other RNA
ggaatttctactcttgtaga

SEQ ID NO: 61 - RNA, 19 nt, synthetic construct
  source 1..19: mol_type = other RNA
taattcccactcttgtggg

SEQ ID NO: 62 - RNA, 15 nt, synthetic construct
  source 1..15: mol_type = other RNA
atctacaagagtaga

SEQ ID NO: 63 - RNA, 15 nt, synthetic construct
  source 1..15: mol_type = other RNA
atctacactagtaga

SEQ ID NO: 64 - RNA, 20 nt, synthetic construct
  source 1..20: mol_type = other RNA
taatttctactaagtgtaga

SEQ ID NO: 65 - RNA, 21 nt, synthetic construct
  source 1..21: mol_type = other RNA
taattttctacttgttgtaga

SEQ ID NO: 66 - RNA, 18 nt, synthetic construct
  source 1..18: mol_type = other RNA
aatttctactgttgtaga

SEQ ID NO: 67 - RNA, 19 nt, synthetic construct
  source 1..19: mol_type = other RNA
gaatttctactgttgtaga

SEQ ID NO: 68 - RNA, 36 nt, synthetic construct
  source 1..36: mol_type = other RNA
gtctaaaggtaccaccaaatttctactgttgtagat

SEQ ID NO: 69 - RNA, 36 nt, synthetic construct
  source 1..36: mol_type = other RNA
gcttagaacctttaaataatttctactattgtagat

SEQ ID NO: 70 - RNA, 10 nt, synthetic construct
  source 1..10: mol_type = other RNA
taatttctac

SEQ ID NO: 71 - skipped

SEQ ID NO: 72 - RNA, 11 nt, synthetic construct
  source 1..11: mol_type = other RNA
ggaatttctac

SEQ ID NO: 73 - RNA, 10 nt, synthetic construct
  source 1..10: mol_type = other RNA
taattcccac

SEQ ID NO: 74 - RNA, 12 nt, synthetic construct
  source 1..12: mol_type = other RNA
taattttctact

SEQ ID NO: 75 - skipped

SEQ ID NO: 76 - RNA, 10 nt, synthetic construct
  source 1..10: mol_type = other RNA
gaatttctac

SEQ ID NO: 77 - RNA, 10 nt, synthetic construct
  source 1..10: mol_type = other RNA
aaatttctac

SEQ ID NO: 78 - DNA, 508 bp, synthetic construct
  source 1..508: mol_type = other DNA
cgttacataacttacggtaaatggcccgcctggctgaccgcccaacgacccccgcccattgacgtcaataatgacgtatgttcccatagtaacgccaatagggactttccattgacgtcaatgggtggagtatttacggtaaactgcccacttggcagtacatcaagtgtatcatatgccaagtacgccccctattgacgtcaatgacggtaaatggcccgcctggcattatgcccagtacatgaccttatgggactttcctacttggcagtacatctacgtattagtcatcgctattaccatggtgatgcggttttggcagtacatcaatgggcgtggatagcggtttgactcacggggatttccaagtctccaccccattgacgtcaatgggagtttgttttggcaccaaaatcaacgggactttccaaaatgtcgtaacaactccgccccattgacgcaaatgggcggtaggcgtgtacggtgggaggtctatataagcagagct

SEQ ID NO: 79 - DNA, 81 bp, synthetic construct
  source 1..81: mol_type = other DNA
gtacttatataagggggtgggggcgcgttcgtcctcagtcgcgatcgaacactcgagccgagcagacgtgcctacggaccg

SEQ ID NO: 80 - DNA, 385 bp, synthetic construct
  source 1..385: mol_type = other DNA
cgttacataacttacggtaaatggcccgcctggctgaccgcccaacgacccccgcccattgacgtcaataatgacgtatgttcccatagtaacgccaatagggactttccattgacgtcaatgggtggagtatttacggtaaactgcccacttggcagtacatcaagtgtatcatatgccaagtacgccccctattgacgtcaatgacggtaaatggcccgcctggcattatgcccagtacatgaccttatgggactttcctacttggcagtacatctacgtattagtcatcgctattaccatggtacttatataagggggtgggggcgcgttcgtcctcagtcgcgatcgaacactcgagccgagcagacgtgcctacggaccg

SEQ ID NO: 81 - DNA, 947 bp, synthetic construct
  source 1..947: mol_type = other DNA
tcaatattggccattagccatattattcattggttatatagcataaatcaatattggctattggccattgcatacgttgtatctatatcataatatgtacatttatattggctcatgtccaatatgaccgccatgttggcattgattattgactagttattaatagtaatcaattacggggtcattagttcatagcccatatatggagttccgcgttacataacttacggtaaatggcccgcctggctgaccgcccaacgacccccgcccattgacgtcaataatgacgtatgttcccatagtaacgccaatagggactttccattgacgtcaatgggtggagtatttacggtaaactgcccacttggcagtacatcaagtgtatcatatgccaagtccgccccctattgacgtcaatgacggtaaatggcccgcctggcattatgcccagtacatgaccttacgggactttcctacttggcagtacatctacgtattagtcatcgctattaccatggtgatgcggttttggcagtacaccaatgggcgtggatagcggtttgactcacggggatttccaagtctccaccccattgacgtcaatgggagtttgttttggcaccaaaatcaacgggactttccaaaatgtcgtaataaccccgccccgttgacgcaaatgggcggtaggcgtgtacggtgggaggtctatataagcagaggtcgtttagtgaaccgtcagatcactagtagctttattgcggtagtttatcacagttaaattgctaacgcagtcagtgctcgactgatcacaggtaagtatcaaggttacaagacaggtttaaggaggccaatagaaactgggcttgtcgagacagagaagattcttgcgtttctgataggcacctattggtcttactgacatccactttgcctttctctccacaggg

SEQ ID NO: 82 - DNA, 195 bp, synthetic construct
  source 1..195: mol_type = other DNA
gaattcgggcggagttagggcggagccaatcagcgtgcgccgttccgaaagttgccttttatggctgggcggagaatgggcggtgaacgccgatgattatataaggacgcgccgggtgtggcacagctagttccgtcgcagccgggatttgggtcgcggttcttgtttgtggatccctgtgatcgtcacttgaca

SEQ ID NO: 83 - DNA, 1723 bp, synthetic construct
  source 1..1723: mol_type = other DNA
atctcgactagttattaatagtaatcaattacggggtcattagttcatagcccatatatggagttccgcgttacataacttacggtaaatggcccgcctggctgaccgcccaacgacccccgcccattgacgtcaataatgacgtatgttcccatagtaacgccaatagggactttccattgacgtcaatgggtggagtatttacggtaaactgcccacttggcagtacatcaagtgtatcatatgccaagtacgccccctattgacgtcaatgacggtaaatggcccgcctggcattatgcccagtacatgaccttatgggactttcctacttggcagtacatctacgtattagtcatcgctattaccatggtcgaggtgagccccacgttctgcttcactctccccatctcccccccctccccacccccaattttgtatttatttattttttaattattttgtgcagcgatgggggcggggggggggggggggcgcgcgccaggcggggcggggcggggcgaggggcggggcggggcgaggcggagaggtgcggcggcagccaatcagagcggcgcgctccgaaagtttccttttatggcgaggcggcggcggcggcggccctataaaaagcgaagcgcgcggcgggcggggagtcgctgcgacgctgccttcgccccgtgccccgctccgccgccgcctcgcgccgcccgccccggctctgactgaccgcgttactcccacaggtgagcgggcgggacggcccttctcctccgggctgtaattagcgcttggtttaatgacggcttgtttcttttctgtggctgcgtgaaagccttgaggggctccgggagggccctttgtgcggggggagcggctcggggggtgcgtgcgtgtgtgtgtgcgtggggagcgccgcgtgcggctccgcgctgcccggcggctgtgagcgctgcgggcgcggcgcggggctttgtgcgctccgcagtgtgcgcgaggggagcgcggccgggggcggtgccccgcggtgcggggggggctgcgaggggaacaaaggctgcgtgcggggtgtgtgcgtgggggggtgagcagggggtgtgggcgcgtcggtcgggctgcaaccccccctgcacccccctccccgagttgctgagcacggcccggcttcgggtgcggggctccgtacggggcgtggcgcggggctcgccgtgccgggcggggggtggcggcaggtgggggtgccgggcggggcggggccgcctcgggccggggagggctcgggggaggggcgcggcggcccccggagcgccggcggctgtcgaggcgcggcgagccgcagccattgccttttatggtaatcgtgcgagagggcgcagggacttcctttgtcccaaatctgtgcggagccgaaatctgggaggcgccgccgcaccccctctagcgggcgcggggcgaagcggtgcggcgccggcaggaaggaaatgggcggggagggccttcgtgcgtcgccgcgccgccgtccccttctccctctccagcctcggggctgtccgcggggggacggctgccttcgggggggacggggcagggcggggttcggcttctggcgtgtgaccggcggctctagagcctctgctaaccatgttcatgccttcttctttttcctacagctcctgggcaacgtgctggttattgtgctgtctcatcattttggcaaagaatt

SEQ ID NO: 84 - DNA, 511 bp, synthetic construct
  source 1..511: mol_type = other DNA
ggggttggggttgcgccttttccaaggcagccctgggtttgcgcagggacgcggctgctctgggcgtggttccgggaaacgcagcggcgccgaccctgggtctcgcacattcttcacgtccgttcgcagcgtcacccggatcttcgccgctacccttgtgggccccccggcgacgcttcctgctccgcccctaagtcgggaaggttccttgcggttcgcggcgtgccggacgtgacaaacggaagccgcacgtctcactagtaccctcgcagacggacagcgccagggagcaatggcagcgcgccgaccgcgatgggctgtggccaatagcggctgctcagcagggcgcgccgagagcagcggccgggaaggggcggtgcgggaggcggggtgtggggcggtagtgtgggccctgttcctgcccgcgcggtgttccgcattctgcaagcctccggagcgcacgtcggcagtcggctccctcgttgaccgaatcaccgacctctctccccag

SEQ ID NO: 85 - DNA, 1195 bp, synthetic construct
  source 1..1195: mol_type = other DNA
gaattcaggctccggtgcccgtcagtgggcagagcgcacatcgcccacagtccccgagaagttggggggaggggtcggcaattgaaccggtgcctagagaaggtggcgcggggtaaactgggaaagtgatgtcgtgtactggctccgcctttttcccgagggtgggggagaaccgtatataagtgcagtagtcgccgtgaacgttctttttcgcaacgggtttgccgccagaacacaggtaagtgccgtgtgtggttcccgcgggcctggcctctttacgggttatggcccttgcgtgccttgaattacttccacctggctgcagtacgtgattcttgatcccgagcttcgggttggaagtgggtgggagagttcgaggccttgcgcttaaggagccccttcgcctcgtgcttgagttgaggcctggcctgggcgctggggccgccgcgtgcgaatctggtggcaccttcgcgcctgtctcgctgctttcgataagtctctagccatttaaaatttttgatgacctgctgcgacgctttttttctggcaagatagtcttgtaaatgcgggccaagatctgcacactggtatttcggtttttggggccgcgggcggcgacggggcccgtgcgtcccagcgcacatgttcggcgaggcggggcctgcgagcgcggccaccgagaatcggacgggggtagtctcaagctggccggcctgctctggtgcctggtctcgcgccgccgtgtatcgccccgccctgggcggcaaggctggcccggtcggcaccagttgcgtgagcggaaagatggccgcttcccggccctgctgcagggagctcaaaatggaggacgcggcgctcgggagagcgggcgggtgagtcacccacacaaaggaaaagggcctttccgtcctcagccgtcgcttcatgtgactccacggagtaccgggcgccgtccaggcacctcgattagttctcgagcttttggagtacgtcgtctttaggttggggggaggggttttatgcgatggagtttccccacactgagtgggtggagactgaagttaggccagcttggcacttgatgtaattctccttggaatttgccctttttgagtttggatcttggttcattctcaagcctcagacagtggttcaaagtttttttcttccatttcaggtgtcgtgacatcatttt

SEQ ID NO: 86 - protein, 120 aa, synthetic construct
EVQLVESGGGLVQPGGSLRLSCAASGNIFSDNLMGWFRQAPGKEREFVAAINWNSRSTYYADSVKGRFTISADNSKNTAYLQMNSLKPEDTAVYYCAKDLTMVRGVPDYWGQGTLVTVSS

SEQ ID NO: 87 - protein, 118 aa, synthetic construct
EVQLVESGGGLVQPGGSLRLSCAASGFTLGDYVMGWFRQAPGKEREWVSVISSSGDFTSYADSVKGRFTISADNSKNTAYLQMNSLKPEDTAVYYCASHYYDSSGTNWGQGTLVTVSS

SEQ ID NO: 88 - protein, 120 aa, synthetic construct
EVQLVESGGGLVQPGGSLRLSCAASGFTFSSAIMGWFRQAPGKEREFVSAITWNGTRTYYADSVKGRFTISADNSKNTAYLQMNSLKPEDTAVYYCAKDLLEVGATPGNWGQGTLVTVSS

SEQ ID NO: 89 - protein, 121 aa, synthetic construct
EVQLLESGGGLVQPGGSLRLSCAASGFTFETYAMSWVRQAPGKGLEWVSGISPSGGITTYADSVKGRFTISRDNSKNTLYLQMNSLRAEDTAVYYCARREWWYDDWYLDYWGQGTLVTVSS

SEQ ID NO: 90 - protein, 121 aa, synthetic construct
EVQLLESGGGLVQPGGSLRLSCAASGFSFSTFAMSWVRQAPGKGLEWVSAISGSGGSTSYADSVKGRFTISRDNSKNTLYLQMNSLRAEDTAVYYCARRGWGSWSWYFDLWGQGTLVTVSS

SEQ ID NO: 91 - protein, 121 aa, synthetic construct
EVQLLESGGGLVQPGGSLRLSCAASGFTFGNYAMAWVRQAPGKGLEWVSAISGSGGGTSYADSVKGRFTISRDNSKNTLYLQMNSLRAEDTAVYYCARREWWYDDWYLDYWGQGTLVTVSS

SEQ ID NO: 92 - protein, 107 aa, synthetic construct
DIQMTQSPSSLSASVGDRVTITCRASQTIERRLNWYQQKPGKAPKLLIYAASDLESGVPSRFSGSGSGTDFTLTISSLQPEDFATYYCQQNNNWPTTFGQGTKVEIK

SEQ ID NO: 93 - protein, 107 aa, synthetic construct
DIQMTQSPSSLSASVGDRVTITCRASQTIGIYLNWYQQKPGKAPKLLIYDASSLHSGVPSRFSGSGSGTDFTLTISSLQPEDFATYYCQQSYSTPFTFGGGTKVEIK

SEQ ID NO: 94 - protein, 106 aa, synthetic construct
DIQMTQSPSSLSASVGDRVTITCRASQTIGDYLNWYQQKPGKAPKLLIYAVTSRASGVPSRFSGSGSGTDFTLTISSLQPEDFATYYCQQSYSTLTFGQGTKVEIK

SEQ ID NO: 95 - protein, 116 aa, synthetic construct
EVQLVESGGGLVQPGGSLRLSCAASGIAFSIDIMGWFRQAPGKEREFVAAVNWNGDSTYYADSVKGRFTISADNSKNTAYLQMNSLKPEDTAVYYCATIDGSWREWGQGTLVTVSS

SEQ ID NO: 96 - protein, 120 aa, synthetic construct
EVQLVESGGGLVQPGGSLRLSCAASGLRFDDYWMGWFRQAPGKEREFVSAINWSGVSTYYADSVKGRFTISADNSKNTAYLQMNSLKPEDTAVYYCAARQYGEYWQAAGWGQGTLVTVSS

SEQ ID NO: 97 - protein, 116 aa, synthetic construct
EVQLVESGGGLVQPGGSLRLSCAASGLTLDYYAMGWFRQAPGKEREFVAGINNGRAITYYADSVKGRFTISADNSKNTAYLQMNSLKPEDTAVYYCATIDGSWREWGQGTLVTVSS

SEQ ID NO: 98 - protein, 120 aa, synthetic construct
EVQLLESGGGLVQPGGSLRLSCAASGFTFSNFPMSWVRQAPGKGLEWVSAITGTGGSTYYADSVKGRFTISRDNSKNTLYLQMNSLRAEDTAVYYCATRTGTTGTAFDIWGQGTLVTVSS

SEQ ID NO: 99 - protein, 118 aa, synthetic construct
EVQLLESGGGLVQPGGSLRLSCAASGYTFSNYAMSWVRQAPGKGLEWVSAVSRSGGSTYYADSVKGRFTISRDNSKNTLYLQMNSLRAEDTAVYYCARDLGYYAFDFWGQGTLVTVSS

SEQ ID NO: 100 - protein, 120 aa, synthetic construct
EVQLLESGGGLVQPGGSLRLSCAASGFTFSTYAMSWVRQAPGKGLEWVSSISGSGGRTDYADSVKGRFTISRDNSKNTLYLQMNSLRAEDTAVYYCARIRSRGSSGFDPWGQGTLVTVSS

SEQ ID NO: 101 - protein, 108 aa, synthetic construct
DIQMTQSPSSLSASVGDRVTITCRASQNIGRYLNWYQQKPGKAPKLLIYDASGLQSGVPSRFSGSGSGTDFTLTISSLQPEDFATYYCQQSYSTPPWTFGGGTKVEIK

SEQ ID NO: 102 - protein, 107 aa, synthetic construct
DIQMTQSPSSLSASVGDRVTITCRASQTIYRYLNWYQQKPGKAPKLLIYHASNLQSGVPSRFSGSGSGTDFTLTISSLQPEDFATYYCQQSYTFPRSFGGGTKVEIK

SEQ ID NO: 103 - protein, 107 aa, synthetic construct
DIQMTQSPSSLSASVGDRVTITCRASQSVYSYLNWYQQKPGKAPKLLIYETSNLQSGVPSRFSGSGSGTDFTLTISSLQPEDFATYYCQQSFTSPLTFGGGTKVEIK

SEQ ID NO: 104 - protein, 120 aa, synthetic construct
EVQLLESGGGLVQPGGSLRLSCAASGFTFENYAMSWVRQAPGKGLEWVSAISGSGGHTYYADSVKGRFTISRDNSKNTLYLQMNSLRAEDTAVYYCAHSNKRTGHAFDIWGQGTLVTVSS

SEQ ID NO: 105 - protein, 121 aa, synthetic construct
EVQLLESGGGLVQPGGSLRLSCAASGFTFSRHAMSWVRQAPGKGLEWVSAITGSGASTYYADSVKGRFTISRDNSKNTLYLQMNSLRAEDTAVYYCARGGRREFHYGLDYWGQGTLVTVSS

SEQ ID NO: 106 - protein, 117 aa, synthetic construct
EVQLLESGGGLVQPGGSLRLSCAASGFTFGNYAMAWVRQAPGKGLEWVSAISGNGGSTFYADSVKGRFTISRDNSKNTLYLQMNSLRAEDTAVYYCARAGRILFDYWGQGTLVTVSS

SEQ ID NO: 107 - protein, 120 aa, synthetic construct
EVQLLESGGGLVQPGGSLRLSCAASGFTFSTYAMSWVRQAPGKGLEWVSAISRSGGNTYYADSVKGRFTISRDNSKNTLYLQMNSLRAEDTAVYYCARVRMKGYTYFDPWGQGTLVTVSS

SEQ ID NO: 108 - protein, 119 aa, synthetic construct
EVQLLESGGGLVQPGGSLRLSCAASGFTFSHYGMSWVRQAPGKGLEWVSSISGSGGSTYYVDSVKGRFTISRDNSKNTLYLQMNSLRAEDTAVYYCARSKRLIHGLDVWGQGTLVTVSS

SEQ ID NO: 109 - protein, 120 aa, synthetic construct
EVQLLESGGGLVQPGGSLRLSCAASGFTFSRYTMSWVRQAPGKGLEWVSTISGSGYSTYYADSVKGRFTISRDNSKNTLYLQMNSLRAEDTAVYYCAHSNKRTGHAFDIWGQGTLVTVSS

SEQ ID NO: 110 - protein, 107 aa, synthetic construct
DIQMTQSPSSLSASVGDRVTITCRASQSVSTFLNWYQQKPGKAPKLLIYGASILQSGVPSRFSGSGSGTDFTLTISSLQPEDFATYYCQQSYTPPLTFGGGTKVEIK

SEQ ID NO: 111 - protein, 107 aa, synthetic construct
DIQMTQSPSSLSASVGDRVTITCRASQSVSRFLNWYQQKPGKAPKLLIYAASVLQSGVPSRFSGSGSGTDFTLTISSLQPEDFATYYCQQTYSPPLTFGGGTKVEIK

SEQ ID NO: 112 - protein, 107 aa, synthetic construct
DIQMTQSPSSLSASVGDRVTITCRASQSIRRYLNWYQQKPGKAPKLLIYHTSRLQSGVPSRFSGSGSGTDFTLTISSLQPEDFATYYCAQGWGRPVTFGQGTKVEIK

SEQ ID NO: 113 - protein, 107 aa, synthetic construct
DIQMTQSPSSLSASVGDRVTITCRASQTISSSLNWYQQKPGKAPKLLIYGASSLRSGVPSRFSGSGSGTDFTLTISSLQPEDFATYYCQQTYSNPITFGGGTKVEIK

SEQ ID NO: 114 - protein, 107 aa, synthetic construct
DIQMTQSPSSLSASVGDRVTITCRTSQSISTYLNWYQQKPGKAPKLLIYGASALQTGVPSRFSGSGSGTDFTLTISSLQPEDFATYYCQQSYTAPLTFGGGTKVEIK

SEQ ID NO: 115 - protein, 107 aa, synthetic construct
DIQMTQSPSSLSASVGDRVTITCRASQTISKYLNWYQQKPGKAPKLLIYGASSLQSGVPSRFSGSGSGTDFTLTISSLQPEDFATYYCQQSYSPPITFGGGTKVEIK

SEQ ID NO: 116 - protein, 116 aa, synthetic construct
EVQLVESGGGLVQPGGSLRLSCAASGIPSIRAMGWFRQAPGKEREWVSSINSDGTSAFYADSVKGRFTISADNSKNTAYLQMNSLKPEDTAVYYCARAYGRGTYDWGQGTLVTVSS

SEQ ID NO: 117 - protein, 119 aa, synthetic construct
EVQLVESGGGLVQPGGSLRLSCAASGFTFGEYAMGWFRQAPGKEREFVASISRSGTLRAYADSVKGRFTISADNSKNTAYLQMNSLKPEDTAVYYCAKESKDYFYMDVWGQGTLVTVSS

SEQ ID NO: 118 - protein, 116 aa, synthetic construct
EVQLVESGGGLVQPGGSLRLSCAASGRTYGMGWFRQAPGKEREFVASVTSGGYTNYADSVKGRFTISADNSKNTAYLQMNSLKPEDTAVYYCARGGGTSVRAFDIWGQGTLVTVSS

SEQ ID NO: 119 - protein, 123 aa, synthetic construct
EVQLLESGGGLVQPGGSLRLSCAASGFAFAAYDMGWVRQAPGKGLEWVSSISGYGSTTYYADSVKGRFTISRDNSKNTLYLQMNSLRAEDTAVYYCARHSGYGSSYGVLFAYWGQGTLVTVSS

SEQ ID NO: 120 - protein, 123 aa, synthetic construct
EVQLLESGGGLVQPGGSLRLSCAASGFAFAAYDMGWVRQAPGKGLEWVATISGGGINTYYPDSVKGRFTISRDNSKNTLYLQMNSLRAEDTAVYYCARHSGYGSSYGVLFAYWGQGTLVTVSS

SEQ ID NO: 121 - protein, 123 aa, synthetic construct
EVQLLESGGGLVQPGGSLRLSCAASGFTFPVYNMAWVRQAPGKGLEWVSEIDALGTDTYYADSVKGRFTISRDNSKNTLYLQMNSLRAEDTAVYYCARHSGYGSSYGVLFAYWGQGTLVTVSS

SEQ ID NO: 122 - protein, 107 aa, synthetic construct
DIQMTQSPSSLSASVGDRVTITCRASQSISNNLNWYQQKPGKAPKLLIYGKNIRPSGVPSRFSGSGSGTDFTLTISSLQPEDFATYYCFQGSQFPYTFGQGTKVEIK

SEQ ID NO: 123 - protein, 109 aa, synthetic construct
DIQMTQSPSSLSASVGDRVTITCRASQDVSSGVAWYQQKPGKAPKLLIYHASQSISGVPSRFSGSGSGTDFTLTISSLQPEDFATYYCQSYDLKSLNVVFGQGTKVEIK

SEQ ID NO: 124 - protein, 107 aa, synthetic construct
DIQMTQSPSSLSASVGDRVTITCQASQSISSYLAWYQQKPGKAPKLLIYGQHNRPSGVPSRFSGSGSGTDFTLTISSLQPEDFATYYCQQSYNTPRTFGQGTKVEIK

SEQ ID NO: 125 - DNA, 21 bp, synthetic construct
  source 1..21: mol_type = other DNA
gatttcgctttcccctaaatg

SEQ ID NO: 126 - DNA, 21 bp, synthetic construct
  source 1..21: mol_type = other DNA
gctttcccctaaatggctgag

SEQ ID NO: 127 - DNA, 21 bp, synthetic construct
  source 1..21: mol_type = other DNA
ccctaaatggctgagcttctc

SEQ ID NO: 128 - DNA, 21 bp, synthetic construct
  source 1..21: mol_type = other DNA
cgagagccccgccctcgttcc

SEQ ID NO: 129 - DNA, 21 bp, synthetic construct
  source 1..21: mol_type = other DNA
gctcttggagccaaccgttgc

SEQ ID NO: 130 - DNA, 21 bp, synthetic construct
  source 1..21: mol_type = other DNA
aagccattagctgcggcactg

SEQ ID NO: 131 - DNA, 21 bp, synthetic construct
  source 1..21: mol_type = other DNA
tgccacagggctgctgcgggc

SEQ ID NO: 132 - DNA, 21 bp, synthetic construct
  source 1..21: mol_type = other DNA
cagagccgccctgaccgccgg

SEQ ID NO: 133 - DNA, 21 bp, synthetic construct
  source 1..21: mol_type = other DNA
tccaggggagatggccattcc

SEQ ID NO: 134 - DNA, 21 bp, synthetic construct
  source 1..21: mol_type = other DNA
cgggccgcctcactgactgga

SEQ ID NO: 135 - DNA, 21 bp, synthetic construct
  source 1..21: mol_type = other DNA
gagtgaaggtatcggctgagc

SEQ ID NO: 136 - DNA, 21 bp, synthetic construct
  source 1..21: mol_type = other DNA
agcccccagacctggctatgg

SEQ ID NO: 137 - DNA, 21 bp, synthetic construct
  source 1..21: mol_type = other DNA
cgggttctttatagtgcagtg

SEQ ID NO: 138 - DNA, 21 bp, synthetic construct
  source 1..21: mol_type = other DNA
tagtgcagtgctggagttcgt

SEQ ID NO: 139 - DNA, 21 bp, synthetic construct
  source 1..21: mol_type = other DNA
gggctgtcctgcgccaggaga

SEQ ID NO: 140 - DNA, 21 bp, synthetic construct
  source 1..21: mol_type = other DNA
aggagaaacctgtctggttct

SEQ ID NO: 141 - DNA, 21 bp, synthetic construct
  source 1..21: mol_type = other DNA
caacagaaccagacaggtttc

SEQ ID NO: 142 - DNA, 21 bp, synthetic construct
  source 1..21: mol_type = other DNA
tgtggtacctggtgcgaggcc

SEQ ID NO: 143 - DNA, 21 bp, synthetic construct
  source 1..21: mol_type = other DNA
ccaccttcttgggcagaagga

SEQ ID NO: 144 - DNA, 21 bp, synthetic construct
  source 1..21: mol_type = other DNA
cttctgcccaagaaggtggga

SEQ ID NO: 145 - DNA, 21 bp, synthetic construct
  source 1..21: mol_type = other DNA
ccagagattcccgcacctgca

SEQ ID NO: 146 - DNA, 21 bp, synthetic construct
  source 1..21: mol_type = other DNA
cctaaacttctgggcttcgcc

SEQ ID NO: 147 - DNA, 21 bp, synthetic construct
  source 1..21: mol_type = other DNA
ccaacgaggagggcgaagccc

SEQ ID NO: 148 - DNA, 21 bp, synthetic construct
  source 1..21: mol_type = other DNA
ttgcagcttttccctaaactt

SEQ ID NO: 149 - DNA, 21 bp, synthetic construct
  source 1..21: mol_type = other DNA
tttcttgcagcttttccctaa

SEQ ID NO: 150 - DNA, 21 bp, synthetic construct
  source 1..21: mol_type = other DNA
gggaaaagctgcaagaaataa

SEQ ID NO: 151 - DNA, 21 bp, synthetic construct
  source 1..21: mol_type = other DNA
agcagcatacctgaaatctat

SEQ ID NO: 152 - DNA, 21 bp, synthetic construct
  source 1..21: mol_type = other DNA
tggtctctttatagatttcag

SEQ ID NO: 153 - DNA, 21 bp, synthetic construct
  source 1..21: mol_type = other DNA
tagatttcaggtatgctgctg

SEQ ID NO: 154 - DNA, 21 bp, synthetic construct
  source 1..21: mol_type = other DNA
aggtatgctgctgaaagtggg

SEQ ID NO: 155 - DNA, 21 bp, synthetic construct
  source 1..21: mol_type = other DNA
ttctctaccagatgcagttca

SEQ ID NO: 156 - DNA, 21 bp, synthetic construct
  source 1..21: mol_type = other DNA
actattcttacctccctctag

SEQ ID NO: 157 - DNA, 21 bp, synthetic construct
  source 1..21: mol_type = other DNA
tctgaggagcccacagccttc

SEQ ID NO: 158 - DNA, 21 bp, synthetic construct
  source 1..21: mol_type = other DNA
agtacctggaccgcacccctc

SEQ ID NO: 159 - DNA, 21 bp, synthetic construct
  source 1..21: mol_type = other DNA
ggtaggcaaaggagacatctt

SEQ ID NO: 160 - DNA, 21 bp, synthetic construct
  source 1..21: mol_type = other DNA
cctacccaaaccgcccagatg

SEQ ID NO: 161 - DNA, 21 bp, synthetic construct
  source 1..21: mol_type = other DNA
atctcaggtggctgcagtggg

SEQ ID NO: 162 - DNA, 21 bp, synthetic construct
  source 1..21: mol_type = other DNA
ttgaagacttcttccaaatac

SEQ ID NO: 163 - DNA, 21 bp, synthetic construct
  source 1..21: mol_type = other DNA
gaagaagtcttcaagaaaata

SEQ ID NO: 164 - DNA, 21 bp, synthetic construct
  source 1..21: mol_type = other DNA
ctccatagttggcttctgggt

SEQ ID NO: 165 - DNA, 21 bp, synthetic construct
  source 1..21: mol_type = other DNA
ctgcagcagctgtgatttcct

SEQ ID NO: 166 - DNA, 21 bp, synthetic construct
  source 1..21: mol_type = other DNA
atctctggactccctcagggc

SEQ ID NO: 167 - DNA, 21 bp, synthetic construct
  source 1..21: mol_type = other DNA
ctctgcagaggtagacgaggc

SEQ ID NO: 168 - DNA, 21 bp, synthetic construct
  source 1..21: mol_type = other DNA
cggatcaatgctcgggccaac

SEQ ID NO: 169 - DNA, 21 bp, synthetic construct
  source 1..21: mol_type = other DNA
catccagggcactggtggcat

SEQ ID NO: 170 - DNA, 21 bp, synthetic construct
  source 1..21: mol_type = other DNA
gtacaggagctgctccacctg

SEQ ID NO: 171 - DNA, 21 bp, synthetic construct
  source 1..21: mol_type = other DNA
ctcaggtggagcagctcctgt

SEQ ID NO: 172 - DNA, 21 bp, synthetic construct
  source 1..21: mol_type = other DNA
tggaaggaggcgctatccggg

SEQ ID NO: 173 - DNA, 21 bp, synthetic construct
  source 1..21: mol_type = other DNA
tccatgagctgctggtgggtt

SEQ ID NO: 174 - DNA, 21 bp, synthetic construct
  source 1..21: mol_type = other DNA
attctggagcatctgcaggag

SEQ ID NO: 175 - DNA, 21 bp, synthetic construct
  source 1..21: mol_type = other DNA
tcatctcgtatccgttgacag

SEQ ID NO: 176 - DNA, 21 bp, synthetic construct
  source 1..21: mol_type = other DNA
ctgtggctgcttcagggccct

SEQ ID NO: 177 - DNA, 21 bp, synthetic construct
  source 1..21: mol_type = other DNA
cttcctcaagggctgccagga

SEQ ID NO: 178 - DNA, 21 bp, synthetic construct
  source 1..21: mol_type = other DNA
gcagcccccacagccctccca

SEQ ID NO: 179 - DNA, 21 bp, synthetic construct
  source 1..21: mol_type = other DNA
tggggacactgctgctcccgc

SEQ ID NO: 180 - DNA, 21 bp, synthetic construct
  source 1..21: mol_type = other DNA
ttgttcacctggtcctgctcc

SEQ ID NO: 181 - DNA, 21 bp, synthetic construct
  source 1..21: mol_type = other DNA
atgcctctttcaggtgagaca

SEQ ID NO: 182 - DNA, 21 bp, synthetic construct
  source 1..21: mol_type = other DNA
aggtgagacattaatccctca

SEQ ID NO: 183 - DNA, 21 bp, synthetic construct
  source 1..21: mol_type = other DNA
acccccatgcctttgccagtg

SEQ ID NO: 184 - DNA, 21 bp, synthetic construct
  source 1..21: mol_type = other DNA
ccagtgccatcttcttcatgt

SEQ ID NO: 185 - DNA, 21 bp, synthetic construct
  source 1..21: mol_type = other DNA
tcctccctgctgcgccaggac

SEQ ID NO: 186 - DNA, 21 bp, synthetic construct
  source 1..21: mol_type = other DNA
ttccaggagactaagacaggt

SEQ ID NO: 187 - DNA, 21 bp, synthetic construct
  source 1..21: mol_type = other DNA
ctcacctgctctgtccttctt

SEQ ID NO: 188 - DNA, 21 bp, synthetic construct
  source 1..21: mol_type = other DNA
aaggaagccagttactcatca

SEQ ID NO: 189 - DNA, 21 bp, synthetic construct
  source 1..21: mol_type = other DNA
accaggcttcgcaagagcaca

SEQ ID NO: 190 - DNA, 21 bp, synthetic construct
  source 1..21: mol_type = other DNA
aatgccaatgtgctcttgcga

SEQ ID NO: 191 - DNA, 21 bp, synthetic construct
  source 1..21: mol_type = other DNA
tctgctgcacatgcccttcac

SEQ ID NO: 192 - DNA, 21 bp, synthetic construct
  source 1..21: mol_type = other DNA
gggttcccttacatgcacgct

SEQ ID NO: 193 - DNA, 21 bp, synthetic construct
  source 1..21: mol_type = other DNA
ctggccctcttttccaggaag

SEQ ID NO: 194 - DNA, 21 bp, synthetic construct
  source 1..21: mol_type = other DNA
caggaagtgcttcgggagatc

SEQ ID NO: 195 - DNA, 21 bp, synthetic construct
  source 1..21: mol_type = other DNA
tagcgacagacttcatgctcc

SEQ ID NO: 196 - DNA, 21 bp, synthetic construct
  source 1..21: mol_type = other DNA
gggccgaggagcatgaagtct

SEQ ID NO: 197 - DNA, 21 bp, synthetic construct
  source 1..21: mol_type = other DNA
acaaccactctggtatcttac

SEQ ID NO: 198 - DNA, 21 bp, synthetic construct
  source 1..21: mol_type = other DNA
ttctcctcttccaggtgctgc

SEQ ID NO: 199 - DNA, 21 bp, synthetic construct
  source 1..21: mol_type = other DNA
ctttatgatctaccaggagag

SEQ ID NO: 200 - DNA, 21 bp, synthetic construct
  source 1..21: mol_type = other DNA
tgatctaccaggagagcgtgg

SEQ ID NO: 201 - DNA, 21 bp, synthetic construct
  source 1..21: mol_type = other DNA
cagaccctggtatacatatat

SEQ ID NO: 202 - DNA, 21 bp, synthetic construct
  source 1..21: mol_type = other DNA
gctgtcggtccatgtaggaga

SEQ ID NO: 203 - DNA, 21 bp, synthetic construct
  source 1..21: mol_type = other DNA
tcctacatggaccgacagcca

SEQ ID NO: 204 - DNA, 21 bp, synthetic construct
  source 1..21: mol_type = other DNA
acaaccccctgcagagtggtg

SEQ ID NO: 205 - DNA, 21 bp, synthetic construct
  source 1..21: mol_type = other DNA
catatcccaatcgccctgaca

SEQ ID NO: 206 - DNA, 21 bp, synthetic construct
  source 1..21: mol_type = other DNA
aggcaccttgagcacaggcct

SEQ ID NO: 207 - DNA, 21 bp, synthetic construct
  source 1..21: mol_type = other DNA
ctccctctttcaggcaccttg

SEQ ID NO: 208 - DNA, 21 bp, synthetic construct
  source 1..21: mol_type = other DNA
tggttttctaggggctgacgt

SEQ ID NO: 209 - DNA, 21 bp, synthetic construct
  source 1..21: mol_type = other DNA
taggggctgacgtttacccta

SEQ ID NO: 210 - DNA, 21 bp, synthetic construct
  source 1..21: mol_type = other DNA
ccctacgtcctggtgaggtga

SEQ ID NO: 211 - DNA, 21 bp, synthetic construct
  source 1..21: mol_type = other DNA
atccagcagcacctgtccccc

SEQ ID NO: 212 - DNA, 21 bp, synthetic construct
  source 1..21: mol_type = other DNA
agttgggcaggagcctgtgct

SEQ ID NO: 213 - DNA, 21 bp, synthetic construct
  source 1..21: mol_type = other DNA
ctggatgaagtcatctgcgtg

SEQ ID NO: 214 - DNA, 21 bp, synthetic construct
  source 1..21: mol_type = other DNA
tagaagatacctgtgtatatt

SEQ ID NO: 215 - DNA, 21 bp, synthetic construct
  source 1..21: mol_type = other DNA
tctgatttcctcagatgtagg

SEQ ID NO: 216 - DNA, 21 bp, synthetic construct
  source 1..21: mol_type = other DNA
ctcagatgtaggggagaaggg

SEQ ID NO: 217 - DNA, 21 bp, synthetic construct
  source 1..21: mol_type = other DNA
tgtcccgcagccagctggctt

SEQ ID NO: 218 - DNA, 21 bp, synthetic construct
  source 1..21: mol_type = other DNA
cgctcgcatcctccacgaacc

SEQ ID NO: 219 - DNA, 21 bp, synthetic construct
  source 1..21: mol_type = other DNA
gcagaggcggggagaggcacg

SEQ ID NO: 220 - DNA, 21 bp, synthetic construct
  source 1..21: mol_type = other DNA
cctacatgccccccacctccg

SEQ ID NO: 221 - DNA, 21 bp, synthetic construct
  source 1..21: mol_type = other DNA
ggctagagtggcgacgccagc

SEQ ID NO: 222 - DNA, 21 bp, synthetic construct
  source 1..21: mol_type = other DNA
ctgcttgggatgatgatgagc

SEQ ID NO: 223 - DNA, 21 bp, synthetic construct
  source 1..21: mol_type = other DNA
cggtccatgggccccatggct

SEQ ID NO: 224 - DNA, 21 bp, synthetic construct
  source 1..21: mol_type = other DNA
aggagggcacctatctggcca

SEQ ID NO: 225 - DNA, 21 bp, synthetic construct
  source 1..21: mol_type = other DNA
gggggttctggggaaagagga

SEQ ID NO: 226 - DNA, 21 bp, synthetic construct
  source 1..21: mol_type = other DNA
cctatgctcatttcgtcctct

SEQ ID NO: 227 - DNA, 21 bp, synthetic construct
  source 1..21: mol_type = other DNA
gtcctctttccccagaacccc

SEQ ID NO: 228 - DNA, 21 bp, synthetic construct
  source 1..21: mol_type = other DNA
cccagaaccccccaaagtgtc

SEQ ID NO: 229 - DNA, 21 bp, synthetic construct
  source 1..21: mol_type = other DNA
agggccctcccttgaggacag

SEQ ID NO: 230 - DNA, 21 bp, synthetic construct
  source 1..21: mol_type = other DNA
ctgtctgcctttcttctgctt

SEQ ID NO: 231 - DNA, 21 bp, synthetic construct
  source 1..21: mol_type = other DNA
ttctgcttgggctcttcaagg

SEQ ID NO: 232 - DNA, 21 bp, synthetic construct
  source 1..21: mol_type = other DNA
aatccttgcaggtggacaggt

SEQ ID NO: 233 - DNA, 21 bp, synthetic construct
  source 1..21: mol_type = other DNA
cccacagctgtctacctgtcc

SEQ ID NO: 234 - DNA, 21 bp, synthetic construct
  source 1..21: mol_type = other DNA
acgggggcgttgtgatgggtt

SEQ ID NO: 235 - DNA, 21 bp, synthetic construct
  source 1..21: mol_type = other DNA
ctcaccctgcagacactcggg

SEQ ID NO: 236 - DNA, 21 bp, synthetic construct
  source 1..21: mol_type = other DNA
acaagctgtccccgctgcacg

SEQ ID NO: 237 - DNA, 21 bp, synthetic construct
  source 1..21: mol_type = other DNA
ttcctaatatttccctcagga

SEQ ID NO: 238 - DNA, 21 bp, synthetic construct
  source 1..21: mol_type = other DNA
cctcaggatagaactggagga

SEQ ID NO: 239 - DNA, 21 bp, synthetic construct
  source 1..21: mol_type = other DNA
cagcagccaaaacaagtggag

SEQ ID NO: 240 - DNA, 21 bp, synthetic construct
  source 1..21: mol_type = other DNA
tcaccacatttgcagcagcca

SEQ ID NO: 241 - DNA, 21 bp, synthetic construct
  source 1..21: mol_type = other DNA
tagctgatatttctcaccaca

SEQ ID NO: 242 - DNA, 21 bp, synthetic construct
  source 1..21: mol_type = other DNA
gctgctgcaaatgtggtgaga

SEQ ID NO: 243 - DNA, 21 bp, synthetic construct
  source 1..21: mol_type = other DNA
ggagaaactcacctgacctcc

SEQ ID NO: 244 - DNA, 21 bp, synthetic construct
  source 1..21: mol_type = other DNA
acctgaggatccctttcccag

SEQ ID NO: 245 - DNA, 21 bp, synthetic construct
  source 1..21: mol_type = other DNA
ccaggtatatggaaccctggg

SEQ ID NO: 246 - DNA, 21 bp, synthetic construct
  source 1..21: mol_type = other DNA
ccattggtggctccggcagca

SEQ ID NO: 247 - DNA, 21 bp, synthetic construct
  source 1..21: mol_type = other DNA
tctatggttatgtggatgcag

SEQ ID NO: 248 - DNA, 21 bp, synthetic construct
  source 1..21: mol_type = other DNA
gcagttcattgcccaagatga

SEQ ID NO: 249 - DNA, 21 bp, synthetic construct
  source 1..21: mol_type = other DNA
tctatgcgatctccagagctc

SEQ ID NO: 250 - DNA, 21 bp, synthetic construct
  source 1..21: mol_type = other DNA
ccccggggaatgcaggtcggg

SEQ ID NO: 251 - DNA, 21 bp, synthetic construct
  source 1..21: mol_type = other DNA
tcaacctcttttctcttatca

SEQ ID NO: 252 - DNA, 21 bp, synthetic construct
  source 1..21: mol_type = other DNA
tcttatcagcccacagaattc

SEQ ID NO: 253 - DNA, 21 bp, synthetic construct
  source 1..21: mol_type = other DNA
tccgtccccacccagggactg

SEQ ID NO: 254 - DNA, 21 bp, synthetic construct
  source 1..21: mol_type = other DNA
ctcactccaccttgtcctcac

SEQ ID NO: 255 - DNA, 21 bp, synthetic construct
  source 1..21: mol_type = other DNA
gcagatagtacagcctgggtg

SEQ ID NO: 256 - DNA, 21 bp, synthetic construct
  source 1..21: mol_type = other DNA
agtgtcggcagcctccaagct

SEQ ID NO: 257 - DNA, 21 bp, synthetic construct
  source 1..21: mol_type = other DNA
agcctgaaatctttcatctta

SEQ ID NO: 258 - DNA, 21 bp, synthetic construct
  source 1..21: mol_type = other DNA
atcttatagggtcctggactc

SEQ ID NO: 259 - DNA, 21 bp, synthetic construct
  source 1..21: mol_type = other DNA
ctgagagccgagtcccatgtt

SEQ ID NO: 260 - DNA, 21 bp, synthetic construct
  source 1..21: mol_type = other DNA
tcatttgtccacagtgtacca

SEQ ID NO: 261 - DNA, 21 bp, synthetic construct
  source 1..21: mol_type = other DNA
acccaaccatcttccttcatg

SEQ ID NO: 262 - DNA, 21 bp, synthetic construct
  source 1..21: mol_type = other DNA
tccacagtgtaccacatgaag

SEQ ID NO: 263 - DNA, 21 bp, synthetic construct
  source 1..21: mol_type = other DNA
tactttcacccaaccatcttc

SEQ ID NO: 264 - DNA, 21 bp, synthetic construct
  source 1..21: mol_type = other DNA
tcagccaggcggcggcggcga

SEQ ID NO: 265 - DNA, 21 bp, synthetic construct
  source 1..21: mol_type = other DNA
aggccaaacattgccagtcgc

SEQ ID NO: 266 - DNA, 21 bp, synthetic construct
  source 1..21: mol_type = other DNA
ttttgaggccaaacattgcca

SEQ ID NO: 267 - DNA, 21 bp, synthetic construct
  source 1..21: mol_type = other DNA
gcctcaaaagaaacgcggtaa

SEQ ID NO: 268 - DNA, 21 bp, synthetic construct
  source 1..21: mol_type = other DNA
gctacggagaaggaggcctcg

SEQ ID NO: 269 - DNA, 21 bp, synthetic construct
  source 1..21: mol_type = other DNA
ttcgcgcccacccgccgcgcg

SEQ ID NO: 270 - DNA, 21 bp, synthetic construct
  source 1..21: mol_type = other DNA
tgtccttggcgccggtggcct

SEQ ID NO: 271 - DNA, 21 bp, synthetic construct
  source 1..21: mol_type = other DNA
atgtccagtttccgaagcatg

SEQ ID NO: 272 - DNA, 21 bp, synthetic construct
  source 1..21: mol_type = other DNA
tttctcaggcatgcttcggaa

SEQ ID NO: 273 - DNA, 21 bp, synthetic construct
  source 1..21: mol_type = other DNA
tcaggcatgcttcggaaactg

SEQ ID NO: 274 - DNA, 21 bp, synthetic construct
  source 1..21: mol_type = other DNA
acatcgtcttcgtttttgatg

SEQ ID NO: 275 - DNA, 21 bp, synthetic construct
  source 1..21: mol_type = other DNA
ttacgccgtcgctgaaaacat

SEQ ID NO: 276 - DNA, 21 bp, synthetic construct
  source 1..21: mol_type = other DNA
agcgacggcgtaacaaactgg

SEQ ID NO: 277 - DNA, 21 bp, synthetic construct
  source 1..21: mol_type = other DNA
gccacaaaggcaccaaaagaa

SEQ ID NO: 278 - DNA, 21 bp, synthetic construct
  source 1..21: mol_type = other DNA
tggtcttcaagtgtttagcca

SEQ ID NO: 279 - DNA, 21 bp, synthetic construct
  source 1..21: mol_type = other DNA
ttttggtgcctttgtggctaa

SEQ ID NO: 280 - DNA, 21 bp, synthetic construct
  source 1..21: mol_type = other DNA
gtgcctttgtggctaaacact

SEQ ID NO: 281 - DNA, 21 bp, synthetic construct
  source 1..21: mol_type = other DNA
ttggtttatggtcttcaagtg

SEQ ID NO: 282 - DNA, 21 bp, synthetic construct
  source 1..21: mol_type = other DNA
tggctaaacacttgaagacca

SEQ ID NO: 283 - DNA, 21 bp, synthetic construct
  source 1..21: mol_type = other DNA
tgctaatggttcgatgcagct

SEQ ID NO: 284 - DNA, 21 bp, synthetic construct
  source 1..21: mol_type = other DNA
tccttacgagaacgtctgtga

SEQ ID NO: 285 - DNA, 21 bp, synthetic construct
  source 1..21: mol_type = other DNA
actagccagtcccgttttgtc

SEQ ID NO: 286 - DNA, 21 bp, synthetic construct
  source 1..21: mol_type = other DNA
tttaactagccagtcccgttt

SEQ ID NO: 287 - DNA, 21 bp, synthetic construct
  source 1..21: mol_type = other DNA
atccttaaggcaaacttaccc

SEQ ID NO: 288 - DNA, 21 bp, synthetic construct
  source 1..21: mol_type = other DNA
ttttttgttttctaggatggg

SEQ ID NO: 289 - DNA, 21 bp, synthetic construct
  source 1..21: mol_type = other DNA
ttttctaggatgggtttgtgg

SEQ ID NO: 290 - DNA, 21 bp, synthetic construct
  source 1..21: mol_type = other DNA
taggatgggtttgtggagttc

SEQ ID NO: 291 - DNA, 21 bp, synthetic construct
  source 1..21: mol_type = other DNA
tggagttcttccatgtagagg

SEQ ID NO: 292 - DNA, 21 bp, synthetic construct
  source 1..21: mol_type = other DNA
caggtgttgctggagtaggag

SEQ ID NO: 293 - DNA, 21 bp, synthetic construct
  source 1..21: mol_type = other DNA
gcatatctaataagatagcct

SEQ ID NO: 294 - DNA, 21 bp, synthetic construct
  source 1..21: mol_type = other DNA
tgcccacactagacatggcgc

SEQ ID NO: 295 - DNA, 21 bp, synthetic construct
  source 1..21: mol_type = other DNA
ggacttgggggtcgtgcagat

SEQ ID NO: 296 - DNA, 21 bp, synthetic construct
  source 1..21: mol_type = other DNA
gattcctggctcttctgggac

SEQ ID NO: 297 - DNA, 21 bp, synthetic construct
  source 1..21: mol_type = other DNA
tgttttcctctgatcttaaca

SEQ ID NO: 298 - DNA, 21 bp, synthetic construct
  source 1..21: mol_type = other DNA
ctctgatcttaacagttccgc

SEQ ID NO: 299 - DNA, 21 bp, synthetic construct
  source 1..21: mol_type = other DNA
gaagctcatagattcgacatt

SEQ ID NO: 300 - DNA, 21 bp, synthetic construct
  source 1..21: mol_type = other DNA
gaggcagctgctacagagatg

SEQ ID NO: 301 - DNA, 21 bp, synthetic construct
  source 1..21: mol_type = other DNA
tactgatacaccatgttggca

SEQ ID NO: 302 - DNA, 21 bp, synthetic construct
  source 1..21: mol_type = other DNA
ctgctaacctcatctcccttt

SEQ ID NO: 303 - DNA, 21 bp, synthetic construct
  source 1..21: mol_type = other DNA
caggcctctactacgtggaca

SEQ ID NO: 304 - DNA, 21 bp, synthetic construct
  source 1..21: mol_type = other DNA
aggggccaccttctctgtagg

SEQ ID NO: 305 - DNA, 21 bp, synthetic construct
  source 1..21: mol_type = other DNA
agggggtagagccactatact

SEQ ID NO: 306 - DNA, 21 bp, synthetic construct
  source 1..21: mol_type = other DNA
gattcgatccagcgggaagtc

SEQ ID NO: 307 - DNA, 21 bp, synthetic construct
  source 1..21: mol_type = other DNA
ccaaaatctgacttgtgtttg

SEQ ID NO: 308 - DNA, 21 bp, synthetic construct
  source 1..21: mol_type = other DNA
gcaaattcgttctcagttccg

SEQ ID NO: 309 - DNA, 21 bp, synthetic construct
  source 1..21: mol_type = other DNA
tcctcgtcaccgtagaacttg

SEQ ID NO: 310 - DNA, 21 bp, synthetic construct
  source 1..21: mol_type = other DNA
tctttctcctcgtcaccgtag

SEQ ID NO: 311 - DNA, 21 bp, synthetic construct
  source 1..21: mol_type = other DNA
cagacaagccaggatgcacgc

SEQ ID NO: 312 - DNA, 21 bp, synthetic construct
  source 1..21: mol_type = other DNA
ttgctgaaaggctcgaaactg

SEQ ID NO: 313 - DNA, 21 bp, synthetic construct
  source 1..21: mol_type = other DNA
tgctctgtcggccagtttcga

SEQ ID NO: 314 - DNA, 21 bp, synthetic construct
  source 1..21: mol_type = other DNA
gagcctttcagcaacaaaggc

SEQ ID NO: 315 - DNA, 21 bp, synthetic construct
  source 1..21: mol_type = other DNA
agcaacaaaggccagacgctg

SEQ ID NO: 316 - DNA, 21 bp, synthetic construct
  source 1..21: mol_type = other DNA
accgtgaactgcaccaccagc

SEQ ID NO: 317 - DNA, 21 bp, synthetic construct
  source 1..21: mol_type = other DNA
ctaatagtttggaccagacag

SEQ ID NO: 318 - DNA, 21 bp, synthetic construct
  source 1..21: mol_type = other DNA
gaccagacagacatgcacgga

SEQ ID NO: 319 - DNA, 21 bp, synthetic construct
  source 1..21: mol_type = other DNA
ccaccacccccaggcacacct

SEQ ID NO: 320 - DNA, 21 bp, synthetic construct
  source 1..21: mol_type = other DNA
cacacctgtacacactgattg

SEQ ID NO: 321 - DNA, 21 bp, synthetic construct
  source 1..21: mol_type = other DNA
tcttcttgggtggcaggaagt

SEQ ID NO: 322 - DNA, 21 bp, synthetic construct
  source 1..21: mol_type = other DNA
aagcatcaggatcctttatct

SEQ ID NO: 323 - DNA, 21 bp, synthetic construct
  source 1..21: mol_type = other DNA
cttctcccttctgcagggtga

SEQ ID NO: 324 - DNA, 21 bp, synthetic construct
  source 1..21: mol_type = other DNA
tgggtggatccaagtgccctt

SEQ ID NO: 325 - DNA, 21 bp, synthetic construct
  source 1..21: mol_type = other DNA
gcgtgctgggcctggacctct

SEQ ID NO: 326 - DNA, 21 bp, synthetic construct
  source 1..21: mol_type = other DNA
ctccaagtctcacctgccaga

SEQ ID NO: 327 - DNA, 21 bp, synthetic construct
  source 1..21: mol_type = other DNA
acaacttcctcatcaccaacg

SEQ ID NO: 328 - DNA, 21 bp, synthetic construct
  source 1..21: mol_type = other DNA
ttacgccccacgtctcgttgc

SEQ ID NO: 329 - DNA, 21 bp, synthetic construct
  source 1..21: mol_type = other DNA
gcaacgagacgtggggcgtaa

SEQ ID NO: 330 - DNA, 21 bp, synthetic construct
  source 1..21: mol_type = other DNA
tccttcatttgtttctctgct

SEQ ID NO: 331 - DNA, 21 bp, synthetic construct
  source 1..21: mol_type = other DNA
ttgtcttcttcctcctcctta

SEQ ID NO: 332 - DNA, 21 bp, synthetic construct
  source 1..21: mol_type = other DNA
cgtttcttgtcttcttcctcc

SEQ ID NO: 333 - DNA, 21 bp, synthetic construct
  source 1..21: mol_type = other DNA
tcctcatcatcctccttgtcc

SEQ ID NO: 334 - DNA, 21 bp, synthetic construct
  source 1..21: mol_type = other DNA
acaactactatggggcagaca

SEQ ID NO: 335 - DNA, 21 bp, synthetic construct
  source 1..21: mol_type = other DNA
cagtctgtgtactcacactca

SEQ ID NO: 336 - DNA, 21 bp, synthetic construct
  source 1..21: mol_type = other DNA
ggagcagccgggagaagaggc

SEQ ID NO: 337 - DNA, 21 bp, synthetic construct
  source 1..21: mol_type = other DNA
ggaccttcttctgcaagctca

SEQ ID NO: 338 - DNA, 21 bp, synthetic construct
  source 1..21: mol_type = other DNA
ggtgctggccgccctcctggc

SEQ ID NO: 339 - DNA, 21 bp, synthetic construct
  source 1..21: mol_type = other DNA
tggtgcccttcaccatcatgc

SEQ ID NO: 340 - DNA, 21 bp, synthetic construct
  source 1..21: mol_type = other DNA
ggcgatgaagaagtaacaggt

SEQ ID NO: 341 - DNA, 21 bp, synthetic construct
  source 1..21: mol_type = other DNA
ccctgtgctggatgccctacc

SEQ ID NO: 342 - DNA, 21 bp, synthetic construct
  source 1..21: mol_type = other DNA
acctcttcctcatgaacatct

SEQ ID NO: 343 - DNA, 21 bp, synthetic construct
  source 1..21: mol_type = other DNA
gacccccgcttccgccaggcc

SEQ ID NO: 344 - DNA, 21 bp, synthetic construct
  source 1..21: mol_type = other DNA
tcgtgcatctgttctccaccc

SEQ ID NO: 345 - DNA, 21 bp, synthetic construct
  source 1..21: mol_type = other DNA
ccccacttccagcaatgaggc

SEQ ID NO: 346 - DNA, 21 bp, synthetic construct
  source 1..21: mol_type = other DNA
gcccttttgttttccagcgct

SEQ ID NO: 347 - DNA, 21 bp, synthetic construct
  source 1..21: mol_type = other DNA
ttttccagcgctggcagattt

SEQ ID NO: 348 - DNA, 21 bp, synthetic construct
  source 1..21: mol_type = other DNA
cagcgctggcagatttacatg

SEQ ID NO: 349 - DNA, 21 bp, synthetic construct
  source 1..21: mol_type = other DNA
catggggatggggaatacaag

SEQ ID NO: 350 - DNA, 21 bp, synthetic construct
  source 1..21: mol_type = other DNA
agcaccttcaggcggggctgc

SEQ ID NO: 351 - DNA, 21 bp, synthetic construct
  source 1..21: mol_type = other DNA
ggtcatcaccagtggtccttt

SEQ ID NO: 352 - DNA, 21 bp, synthetic construct
  source 1..21: mol_type = other DNA
gaggcaattggggcaggctga

SEQ ID NO: 353 - DNA, 21 bp, synthetic construct
  source 1..21: mol_type = other DNA
gcctggttccaaaggtcttgt

SEQ ID NO: 354 - DNA, 21 bp, synthetic construct
  source 1..21: mol_type = other DNA
cctctttggcctggttccaaa

SEQ ID NO: 355 - DNA, 21 bp, synthetic construct
  source 1..21: mol_type = other DNA
tttacctctttggcctggttc

SEQ ID NO: 356 - DNA, 21 bp, synthetic construct
  source 1..21: mol_type = other DNA
gaaccaggccaaagaggtaaa

SEQ ID NO: 357 - DNA, 21 bp, synthetic construct
  source 1..21: mol_type = other DNA
cttgcagggagacggcagagg

SEQ ID NO: 358 - DNA, 21 bp, synthetic construct
  source 1..21: mol_type = other DNA
tccatccagtcactcaggtaa

SEQ ID NO: 359 - DNA, 21 bp, synthetic construct
  source 1..21: mol_type = other DNA
acttagctccagctgcagaaa

SEQ ID NO: 360 - DNA, 21 bp, synthetic construct
  source 1..21: mol_type = other DNA
caaatgcctccatttcactta

SEQ ID NO: 361 - DNA, 21 bp, synthetic construct
  source 1..21: mol_type = other DNA
tgcagctggagctaagtgaaa

SEQ ID NO: 362 - DNA, 21 bp, synthetic construct
  source 1..21: mol_type = other DNA
taaaccaacacaagtccaact

SEQ ID NO: 363 - DNA, 21 bp, synthetic construct
  source 1..21: mol_type = other DNA
cgcttcttgtttgcagatgag

SEQ ID NO: 364 - DNA, 21 bp, synthetic construct
  source 1..21: mol_type = other DNA
cagatgagccttcccagcgtc

SEQ ID NO: 365 - DNA, 21 bp, synthetic construct
  source 1..21: mol_type = other DNA
tggccagtttgatgttgagtt

SEQ ID NO: 366 - DNA, 21 bp, synthetic construct
  source 1..21: mol_type = other DNA
cattgcggcaggccgcggcaa

SEQ ID NO: 367 - DNA, 21 bp, synthetic construct
  source 1..21: mol_type = other DNA
atgttgagttccggcttgccg

SEQ ID NO: 368 - DNA, 21 bp, synthetic construct
  source 1..21: mol_type = other DNA
ttccacagagactccaagcac

SEQ ID NO: 369 - DNA, 21 bp, synthetic construct
  source 1..21: mol_type = other DNA
tcgtgacaaggccctgctcaa

SEQ ID NO: 370 - DNA, 21 bp, synthetic construct
  source 1..21: mol_type = other DNA
ctttggccggtacgggcggga

SEQ ID NO: 371 - DNA, 21 bp, synthetic construct
  source 1..21: mol_type = other DNA
gccggtacgggcgggaggaca

SEQ ID NO: 372 - DNA, 21 bp, synthetic construct
  source 1..21: mol_type = other DNA
cactgtccacttccctaggtg

SEQ ID NO: 373 - DNA, 21 bp, synthetic construct
  source 1..21: mol_type = other DNA
tagagggaggaagtgaggtgg

SEQ ID NO: 374 - DNA, 21 bp, synthetic construct
  source 1..21: mol_type = other DNA
atggcctgggctggtggggga

SEQ ID NO: 375 - DNA, 21 bp, synthetic construct
  source 1..21: mol_type = other DNA
ggggcacattgagtttcatgg

SEQ ID NO: 376 - DNA, 21 bp, synthetic construct
  source 1..21: mol_type = other DNA
cgtggatcagacactgcgaga

SEQ ID NO: 377 - DNA, 21 bp, synthetic construct
  source 1..21: mol_type = other DNA
tccacccaccctctccatagg

SEQ ID NO: 378 - DNA, 21 bp, synthetic construct
  source 1..21: mol_type = other DNA
agctcacacttcacctgcaga

SEQ ID NO: 379 - DNA, 21 bp, synthetic construct
  source 1..21: mol_type = other DNA
tccccaaacttaggtaccctt

SEQ ID NO: 380 - DNA, 21 bp, synthetic construct
  source 1..21: mol_type = other DNA
tggagagtctcagtaacaagg

SEQ ID NO: 381 - DNA, 21 bp, synthetic construct
  source 1..21: mol_type = other DNA
gccttctcgaagcaccagcac

SEQ ID NO: 382 - DNA, 21 bp, synthetic construct
  source 1..21: mol_type = other DNA
acagcagctcaggtctcaggc

SEQ ID NO: 383 - DNA, 21 bp, synthetic construct
  source 1..21: mol_type = other DNA
ttctgcacggccttgctgtgg

SEQ ID NO: 384 - DNA, 21 bp, synthetic construct
  source 1..21: mol_type = other DNA
tcctcttccccacagcaaggc

SEQ ID NO: 385 - DNA, 21 bp, synthetic construct
  source 1..21: mol_type = other DNA
tcctgcctctgttctctccta

SEQ ID NO: 386 - DNA, 21 bp, synthetic construct
  source 1..21: mol_type = other DNA
tgtacatcttgctgaggtagg

SEQ ID NO: 387 - DNA, 21 bp, synthetic construct
  source 1..21: mol_type = other DNA
tgacaatgacaagctgtatct

SEQ ID NO: 388 - DNA, 21 bp, synthetic construct
  source 1..21: mol_type = other DNA
tctccagtggtgggtcctgag

SEQ ID NO: 389 - DNA, 21 bp, synthetic construct
  source 1..21: mol_type = other DNA
tttctgtagctcagagccaag

SEQ ID NO: 390 - DNA, 21 bp, synthetic construct
  source 1..21: mol_type = other DNA
tgtagctcagagccaagtaca

SEQ ID NO: 391 - DNA, 21 bp, synthetic construct
  source 1..21: mol_type = other DNA
gcagacaggtgtcagtgtgct

SEQ ID NO: 392 - DNA, 21 bp, synthetic construct
  source 1..21: mol_type = other DNA
ctttggcagacaggtgtcagt

SEQ ID NO: 393 - DNA, 21 bp, synthetic construct
  source 1..21: mol_type = other DNA
atgtcagggaagatctctctg

SEQ ID NO: 394 - DNA, 21 bp, synthetic construct
  source 1..21: mol_type = other DNA
gcaagatcatcagagagatct

SEQ ID NO: 395 - DNA, 21 bp, synthetic construct
  source 1..21: mol_type = other DNA
acttgcatcagatattgctac

SEQ ID NO: 396 - DNA, 21 bp, synthetic construct
  source 1..21: mol_type = other DNA
ggtcaagtccaggcaggggtg

SEQ ID NO: 397 - DNA, 21 bp, synthetic construct
  source 1..21: mol_type = other DNA
gtacttacactctcagaaccc

SEQ ID NO: 398 - DNA, 21 bp, synthetic construct
  source 1..21: mol_type = other DNA
aggatccgctctgcccagtca

SEQ ID NO: 399 - DNA, 21 bp, synthetic construct
  source 1..21: mol_type = other DNA
gtacctctgcagaagaggacg

SEQ ID NO: 400 - DNA, 21 bp, synthetic construct
  source 1..21: mol_type = other DNA
gatgaccgttcccgaggtgca

SEQ ID NO: 401 - DNA, 21 bp, synthetic construct
  source 1..21: mol_type = other DNA
gtttagatgaccgttcccgag

SEQ ID NO: 402 - DNA, 21 bp, synthetic construct
  source 1..21: mol_type = other DNA
gagaacccagagggtggagcc

SEQ ID NO: 403 - DNA, 21 bp, synthetic construct
  source 1..21: mol_type = other DNA
ctttttagcctcctaaggatc

SEQ ID NO: 404 - DNA, 21 bp, synthetic construct
  source 1..21: mol_type = other DNA
gcctcctaaggatctggaagc

SEQ ID NO: 405 - DNA, 21 bp, synthetic construct
  source 1..21: mol_type = other DNA
agggcacctgaagaaagcctg

SEQ ID NO: 406 - DNA, 21 bp, synthetic construct
  source 1..21: mol_type = other DNA
ttcaggtgccctgaaagtggc

SEQ ID NO: 407 - DNA, 21 bp, synthetic construct
  source 1..21: mol_type = other DNA
cctggacctggacctgggcct

SEQ ID NO: 408 - DNA, 21 bp, synthetic construct
  source 1..21: mol_type = other DNA
gctggtggagcctgcccactg

SEQ ID NO: 409 - DNA, 21 bp, synthetic construct
  source 1..21: mol_type = other DNA
ctgctttagctggtggagcct

SEQ ID NO: 410 - DNA, 21 bp, synthetic construct
  source 1..21: mol_type = other DNA
gcatcacttgctgtatcctct

SEQ ID NO: 411 - DNA, 21 bp, synthetic construct
  source 1..21: mol_type = other DNA
cttttggcatcacttgctgta

SEQ ID NO: 412 - DNA, 21 bp, synthetic construct
  source 1..21: mol_type = other DNA
gagggcgcccccgtttccttt

SEQ ID NO: 413 - DNA, 21 bp, synthetic construct
  source 1..21: mol_type = other DNA
cccacttccacctgacttttt

SEQ ID NO: 414 - DNA, 21 bp, synthetic construct
  source 1..21: mol_type = other DNA
agcctctcccattggccctgg

SEQ ID NO: 415 - DNA, 21 bp, synthetic construct
  source 1..21: mol_type = other DNA
gaaacagtaccatctccctga

SEQ ID NO: 416 - DNA, 21 bp, synthetic construct
  source 1..21: mol_type = other DNA
gtatgctgggaaccggggccc

SEQ ID NO: 417 - DNA, 21 bp, synthetic construct
  source 1..21: mol_type = other DNA
caaaggaggaaggggccccgg

SEQ ID NO: 418 - DNA, 21 bp, synthetic construct
  source 1..21: mol_type = other DNA
tcttctgcttctttggtatgc

SEQ ID NO: 419 - DNA, 21 bp, synthetic construct
  source 1..21: mol_type = other DNA
aggggaccaagggaattttat

SEQ ID NO: 420 - DNA, 21 bp, synthetic construct
  source 1..21: mol_type = other DNA
gcttctgctgcccttgatgac

SEQ ID NO: 421 - DNA, 21 bp, synthetic construct
  source 1..21: mol_type = other DNA
ccaaaggaaaagcctcctttt

SEQ ID NO: 422 - DNA, 21 bp, synthetic construct
  source 1..21: mol_type = other DNA
ctttggcaaagggagaggtag

SEQ ID NO: 423 - DNA, 21 bp, synthetic construct
  source 1..21: mol_type = other DNA
ttaccctgtggtgcagtgtct

SEQ ID NO: 424 - DNA, 21 bp, synthetic construct
  source 1..21: mol_type = other DNA
gcaaagggagaggtagacact

SEQ ID NO: 425 - DNA, 21 bp, synthetic construct
  source 1..21: mol_type = other DNA
agtctttattaccctgtggtg

SEQ ID NO: 426 - DNA, 21 bp, synthetic construct
  source 1..21: mol_type = other DNA
aagcacatgctcctttaagtc

SEQ ID NO: 427 - DNA, 21 bp, synthetic construct
  source 1..21: mol_type = other DNA
tgctcctgggataaggaactt

SEQ ID NO: 428 - DNA, 21 bp, synthetic construct
  source 1..21: mol_type = other DNA
ggtctttatgctcctgggata

SEQ ID NO: 429 - DNA, 21 bp, synthetic construct
  source 1..21: mol_type = other DNA
gaggatctagaggacgaggag

SEQ ID NO: 430 - DNA, 21 bp, synthetic construct
  source 1..21: mol_type = other DNA
cgctgcttggccacctggctc

SEQ ID NO: 431 - DNA, 21 bp, synthetic construct
  source 1..21: mol_type = other DNA
ttgcacatccacggtttgcgc

SEQ ID NO: 432 - DNA, 21 bp, synthetic construct
  source 1..21: mol_type = other DNA
tacttgtccttgtacatcttg

SEQ ID NO: 433 - DNA, 21 bp, synthetic construct
  source 1..21: mol_type = other DNA
ccgcgctgccagtcgaggcag

SEQ ID NO: 434 - DNA, 21 bp, synthetic construct
  source 1..21: mol_type = other DNA
acgtttcccgcgctgccagtc

SEQ ID NO: 435 - DNA, 21 bp, synthetic construct
  source 1..21: mol_type = other DNA
catttttatcatttatcccag

SEQ ID NO: 436 - DNA, 21 bp, synthetic construct
  source 1..21: mol_type = other DNA
tcatttatcccaggaaagtgc

SEQ ID NO: 437 - DNA, 21 bp, synthetic construct
  source 1..21: mol_type = other DNA
acaatggagagtatgttatct

SEQ ID NO: 438 - DNA, 21 bp, synthetic construct
  source 1..21: mol_type = other DNA
tcccaggaaagtgcagataac

SEQ ID NO: 439 - DNA, 21 bp, synthetic construct
  source 1..21: mol_type = other DNA
tttaacaatggagagtatgtt

SEQ ID NO: 440 - DNA, 21 bp, synthetic construct
  source 1..21: mol_type = other DNA
gggatcgtcctgcaagaccta

SEQ ID NO: 441 - DNA, 21 bp, synthetic construct
  source 1..21: mol_type = other DNA
acacttgttctaaaagagtag

SEQ ID NO: 442 - DNA, 21 bp, synthetic construct
  source 1..21: mol_type = other DNA
atttaacacttgttctaaaag

SEQ ID NO: 443 - DNA, 21 bp, synthetic construct
  source 1..21: mol_type = other DNA
ccagtcttttttgatttaaca

SEQ ID NO: 444 - DNA, 21 bp, synthetic construct
  source 1..21: mol_type = other DNA
gaacaagtgttaaatcaaaaa

SEQ ID NO: 445 - DNA, 21 bp, synthetic construct
  source 1..21: mol_type = other DNA
caaacagatatttaccagtct

SEQ ID NO: 446 - DNA, 21 bp, synthetic construct
  source 1..21: mol_type = other DNA
ttttctttctaagtcgttact

SEQ ID NO: 447 - DNA, 21 bp, synthetic construct
  source 1..21: mol_type = other DNA
tttctaagtcgttactaagaa

SEQ ID NO: 448 - DNA, 21 bp, synthetic construct
  source 1..21: mol_type = other DNA
taagtcgttactaagaagtcc

SEQ ID NO: 449 - DNA, 21 bp, synthetic construct
  source 1..21: mol_type = other DNA
tgtaaaaattgcactacttct

SEQ ID NO: 450 - DNA, 21 bp, synthetic construct
  source 1..21: mol_type = other DNA
atagctgttgctgtttctgta

SEQ ID NO: 451 - DNA, 21 bp, synthetic construct
  source 1..21: mol_type = other DNA
cagaaacagcaacagctatta

SEQ ID NO: 452 - DNA, 21 bp, synthetic construct
  source 1..21: mol_type = other DNA
ctccaaaacttgctgatttaa

SEQ ID NO: 453 - DNA, 21 bp, synthetic construct
  source 1..21: mol_type = other DNA
gagcaaagacaacagcagttt

SEQ ID NO: 454 - DNA, 21 bp, synthetic construct
  source 1..21: mol_type = other DNA
caggaacatcaatgtgaggga

SEQ ID NO: 455 - DNA, 21 bp, synthetic construct
  source 1..21: mol_type = other DNA
cccatggagcttacccagcct

SEQ ID NO: 456 - DNA, 21 bp, synthetic construct
  source 1..21: mol_type = other DNA
cctgcacccctgagcctgtga

SEQ ID NO: 457 - DNA, 21 bp, synthetic construct
  source 1..21: mol_type = other DNA
ccagcaggcagctccctgaag

SEQ ID NO: 458 - DNA, 21 bp, synthetic construct
  source 1..21: mol_type = other DNA
cgcaaatgctccttcagctgg

SEQ ID NO: 459 - DNA, 21 bp, synthetic construct
  source 1..21: mol_type = other DNA
gagagattgagaccgttcgct

SEQ ID NO: 460 - DNA, 21 bp, synthetic construct
  source 1..21: mol_type = other DNA
ccaggatgtgggggtcggcac

SEQ ID NO: 461 - DNA, 21 bp, synthetic construct
  source 1..21: mol_type = other DNA
tcctgcccctacccacgacag

SEQ ID NO: 462 - DNA, 21 bp, synthetic construct
  source 1..21: mol_type = other DNA
acgtggttcccgcgcacagcg

SEQ ID NO: 463 - DNA, 21 bp, synthetic construct
  source 1..21: mol_type = other DNA
cagcccgaggcgctgacctca

SEQ ID NO: 464 - DNA, 21 bp, synthetic construct
  source 1..21: mol_type = other DNA
cggtatcccagggccacggca

SEQ ID NO: 465 - DNA, 21 bp, synthetic construct
  source 1..21: mol_type = other DNA
cctgccccatctcagtgcaac

SEQ ID NO: 466 - DNA, 21 bp, synthetic construct
  source 1..21: mol_type = other DNA
ttgggaaaaacagctgatgaa

SEQ ID NO: 467 - DNA, 21 bp, synthetic construct
  source 1..21: mol_type = other DNA
tctcctaggtttcatcagctg

SEQ ID NO: 468 - DNA, 21 bp, synthetic construct
  source 1..21: mol_type = other DNA
atcagctgtttttcccaacaa

SEQ ID NO: 469 - DNA, 21 bp, synthetic construct
  source 1..21: mol_type = other DNA
ccaacaaatatatggtgttgt

SEQ ID NO: 470 - DNA, 21 bp, synthetic construct
  source 1..21: mol_type = other DNA
aaggcacattgcttggtacat

SEQ ID NO: 471 - DNA, 21 bp, synthetic construct
  source 1..21: mol_type = other DNA
catgtaccaagcaatgtgcct

SEQ ID NO: 472 - DNA, 21 bp, synthetic construct
  source 1..21: mol_type = other DNA
cataggacctcttttaaaggc

SEQ ID NO: 473 - DNA, 21 bp, synthetic construct
  source 1..21: mol_type = other DNA
ttttttccataggacctcttt

SEQ ID NO: 474 - DNA, 21 bp, synthetic construct
  source 1..21: mol_type = other DNA
tccttttgttttttccatagg

SEQ ID NO: 475 - DNA, 21 bp, synthetic construct
  source 1..21: mol_type = other DNA
aaagaggtcctatggaaaaaa

SEQ ID NO: 476 - DNA, 21 bp, synthetic construct
  source 1..21: mol_type = other DNA
cagttctgcaactttatcctt

SEQ ID NO: 477 - DNA, 21 bp, synthetic construct
  source 1..21: mol_type = other DNA
aaagatgagaaagctctgaat

SEQ ID NO: 478 - DNA, 21 bp, synthetic construct
  source 1..21: mol_type = other DNA
tcatcttttaaaaatagggtt

SEQ ID NO: 479 - DNA, 21 bp, synthetic construct
  source 1..21: mol_type = other DNA
aaaatagggtttatttagaca

SEQ ID NO: 480 - DNA, 21 bp, synthetic construct
  source 1..21: mol_type = other DNA
tttagacactgtgtcaggtag

SEQ ID NO: 481 - DNA, 21 bp, synthetic construct
  source 1..21: mol_type = other DNA
gacactgtgtcaggtagcctc

SEQ ID NO: 482 - DNA, 21 bp, synthetic construct
  source 1..21: mol_type = other DNA
atactcatcttcatctgatga

SEQ ID NO: 483 - DNA, 21 bp, synthetic construct
  source 1..21: mol_type = other DNA
gcgattccatttcatactcat

SEQ ID NO: 484 - DNA, 21 bp, synthetic construct
  source 1..21: mol_type = other DNA
cagagtctcttccatctccca

SEQ ID NO: 485 - DNA, 21 bp, synthetic construct
  source 1..21: mol_type = other DNA
cattgctccataggacaatcc

SEQ ID NO: 486 - DNA, 21 bp, synthetic construct
  source 1..21: mol_type = other DNA
catcttaaaatatatactggt

SEQ ID NO: 487 - DNA, 21 bp, synthetic construct
  source 1..21: mol_type = other DNA
tggaagatcattttccatctt

SEQ ID NO: 488 - DNA, 21 bp, synthetic construct
  source 1..21: mol_type = other DNA
agatggaaaatgatcttccac

SEQ ID NO: 489 - DNA, 21 bp, synthetic construct
  source 1..21: mol_type = other DNA
atacaacatcatcaatcattt

SEQ ID NO: 490 - DNA, 21 bp, synthetic construct
  source 1..21: mol_type = other DNA
ctcaccgctgcttgggataca

SEQ ID NO: 491 - DNA, 21 bp, synthetic construct
  source 1..21: mol_type = other DNA
gttatttactcaccgctgctt

SEQ ID NO: 492 - DNA, 21 bp, synthetic construct
  source 1..21: mol_type = other DNA
acaacctgtatcccaagcagc

SEQ ID NO: 493 - DNA, 21 bp, synthetic construct
  source 1..21: mol_type = other DNA
taggtcattcaagacacagat

SEQ ID NO: 494 - DNA, 21 bp, synthetic construct
  source 1..21: mol_type = other DNA
aaaagcatacataccattcat

SEQ ID NO: 495 - DNA, 21 bp, synthetic construct
  source 1..21: mol_type = other DNA
ttttaaaaagcatacatacca

SEQ ID NO: 496 - DNA, 21 bp, synthetic construct
  source 1..21: mol_type = other DNA
tgtcacatttcagaataccta

SEQ ID NO: 497 - DNA, 21 bp, synthetic construct
  source 1..21: mol_type = other DNA
ttcatttttaggtattctgaa

SEQ ID NO: 498 - DNA, 21 bp, synthetic construct
  source 1..21: mol_type = other DNA
ggtattctgaaatgtgacaga

SEQ ID NO: 499 - DNA, 21 bp, synthetic construct
  source 1..21: mol_type = other DNA
tttttcttggttacatccata

SEQ ID NO: 500 - DNA, 21 bp, synthetic construct
  source 1..21: mol_type = other DNA
ctgcaggtggctatggtatgg

SEQ ID NO: 501 - DNA, 21 bp, synthetic construct
  source 1..21: mol_type = other DNA
tttgtctttttctagttgtca

SEQ ID NO: 502 - DNA, 21 bp, synthetic construct
  source 1..21: mol_type = other DNA
tctttttctagttgtcactga

SEQ ID NO: 503 - DNA, 21 bp, synthetic construct
  source 1..21: mol_type = other DNA
tagttgtcactgaaacagtaa

SEQ ID NO: 504 - DNA, 21 bp, synthetic construct
  source 1..21: mol_type = other DNA
gcatagccattgctggtcccg

SEQ ID NO: 505 - DNA, 21 bp, synthetic construct
  source 1..21: mol_type = other DNA
ttcctggcagaaggcgggacc

SEQ ID NO: 506 - DNA, 21 bp, synthetic construct
  source 1..21: mol_type = other DNA
tccagccggctccctccacca

SEQ ID NO: 507 - DNA, 21 bp, synthetic construct
  source 1..21: mol_type = other DNA
tttctccagccggctccctcc

SEQ ID NO: 508 - DNA, 21 bp, synthetic construct
  source 1..21: mol_type = other DNA
tgtagccgctgctgccatgag

SEQ ID NO: 509 - DNA, 21 bp, synthetic construct
  source 1..21: mol_type = other DNA
cctcttgcagctggaagcaca

SEQ ID NO: 510 - DNA, 21 bp, synthetic construct
  source 1..21: mol_type = other DNA
aaaggttgagcctggggagtt

SEQ ID NO: 511 - DNA, 21 bp, synthetic construct
  source 1..21: mol_type = other DNA
ctttcaaaggttgagcctggg

SEQ ID NO: 512 - DNA, 21 bp, synthetic construct
  source 1..21: mol_type = other DNA
aaaggaaaactcacgttaccc

SEQ ID NO: 513 - DNA, 21 bp, synthetic construct
  source 1..21: mol_type = other DNA
atcccctctccagggagctcc

SEQ ID NO: 514 - DNA, 21 bp, synthetic construct
  source 1..21: mol_type = other DNA
tttgtttctcagcatcttctt

SEQ ID NO: 515 - DNA, 21 bp, synthetic construct
  source 1..21: mol_type = other DNA
actccgtcctctggttgaaga

SEQ ID NO: 516 - DNA, 21 bp, synthetic construct
  source 1..21: mol_type = other DNA
tttctcagcatcttcttcaac

SEQ ID NO: 517 - DNA, 21 bp, synthetic construct
  source 1..21: mol_type = other DNA
tcagcatcttcttcaaccaga

SEQ ID NO: 518 - DNA, 21 bp, synthetic construct
  source 1..21: mol_type = other DNA
acagggacagaattggatgat

SEQ ID NO: 519 - DNA, 21 bp, synthetic construct
  source 1..21: mol_type = other DNA
ctcaaggggagtcgatcggca

SEQ ID NO: 520 - DNA, 21 bp, synthetic construct
  source 1..21: mol_type = other DNA
ttggggatggggagtgtgttg

SEQ ID NO: 521 - DNA, 21 bp, synthetic construct
  source 1..21: mol_type = other DNA
gtctccacagtgcctttcttg

SEQ ID NO: 522 - DNA, 21 bp, synthetic construct
  source 1..21: mol_type = other DNA
cagtgtcaggcacctacgatg

SEQ ID NO: 523 - DNA, 21 bp, synthetic construct
  source 1..21: mol_type = other DNA
caccctggactcagcacatcc

SEQ ID NO: 524 - DNA, 21 bp, synthetic construct
  source 1..21: mol_type = other DNA
acagtgtttggcatgcagaac

SEQ ID NO: 525 - DNA, 21 bp, synthetic construct
  source 1..21: mol_type = other DNA
gcatgcagaacaatctggccc

SEQ ID NO: 526 - DNA, 21 bp, synthetic construct
  source 1..21: mol_type = other DNA
ttgcagcatatggggtgaaga

SEQ ID NO: 527 - DNA, 21 bp, synthetic construct
  source 1..21: mol_type = other DNA
tttctccccagcctgcaccac

SEQ ID NO: 528 - DNA, 21 bp, synthetic construct
  source 1..21: mol_type = other DNA
tccccagcctgcaccacaagt

SEQ ID NO: 529 - DNA, 21 bp, synthetic construct
  source 1..21: mol_type = other DNA
tctaggatcaggaacttgcag

SEQ ID NO: 530 - DNA, 21 bp, synthetic construct
  source 1..21: mol_type = other DNA
cacaaggactgcaagttcctg

SEQ ID NO: 531 - DNA, 21 bp, synthetic construct
  source 1..21: mol_type = other DNA
gggtgtcttctgaaaaagaag

SEQ ID NO: 532 - DNA, 21 bp, synthetic construct
  source 1..21: mol_type = other DNA
tttttttagggtgtcttctga

SEQ ID NO: 533 - DNA, 21 bp, synthetic construct
  source 1..21: mol_type = other DNA
agaagacaccctaaaaaaaga

SEQ ID NO: 534 - DNA, 21 bp, synthetic construct
  source 1..21: mol_type = other DNA
ggcctgagtcagcattgtagg

SEQ ID NO: 535 - DNA, 21 bp, synthetic construct
  source 1..21: mol_type = other DNA
ttcttaccattagcttcggct

SEQ ID NO: 536 - DNA, 21 bp, synthetic construct
  source 1..21: mol_type = other DNA
tggacacagtcttcaggtctc

SEQ ID NO: 537 - DNA, 21 bp, synthetic construct
  source 1..21: mol_type = other DNA
tcctttcaggagacctgaaga

SEQ ID NO: 538 - DNA, 21 bp, synthetic construct
  source 1..21: mol_type = other DNA
aggagacctgaagactgtgtc

SEQ ID NO: 539 - DNA, 21 bp, synthetic construct
  source 1..21: mol_type = other DNA
cctgtctctttcacagatatc

SEQ ID NO: 540 - DNA, 21 bp, synthetic construct
  source 1..21: mol_type = other DNA
acagatatccacagctacggc

SEQ ID NO: 541 - DNA, 21 bp, synthetic construct
  source 1..21: mol_type = other DNA
ccacgtacccagagcaatgag

SEQ ID NO: 542 - DNA, 21 bp, synthetic construct
  source 1..21: mol_type = other DNA
ttgcagcggaggaggtgagga

SEQ ID NO: 543 - DNA, 21 bp, synthetic construct
  source 1..21: mol_type = other DNA
tattctatccatgctgtcccc

SEQ ID NO: 544 - DNA, 21 bp, synthetic construct
  source 1..21: mol_type = other DNA
tccaggtctgctcccgccgcg

SEQ ID NO: 545 - DNA, 21 bp, synthetic construct
  source 1..21: mol_type = other DNA
ctgttccatcattagcttctt

SEQ ID NO: 546 - DNA, 21 bp, synthetic construct
  source 1..21: mol_type = other DNA
ctttttcttgcaggaaatctc

SEQ ID NO: 547 - DNA, 21 bp, synthetic construct
  source 1..21: mol_type = other DNA
gggccagggcttcctcggaga

SEQ ID NO: 548 - DNA, 21 bp, synthetic construct
  source 1..21: mol_type = other DNA
ttgcaggaaatctccgaggaa

SEQ ID NO: 549 - DNA, 21 bp, synthetic construct
  source 1..21: mol_type = other DNA
atatctttctggtttcaggtg

SEQ ID NO: 550 - DNA, 21 bp, synthetic construct
  source 1..21: mol_type = other DNA
gggcctggacttcccatgtca

SEQ ID NO: 551 - DNA, 21 bp, synthetic construct
  source 1..21: mol_type = other DNA
tggtttcaggtgacatgggaa

SEQ ID NO: 552 - DNA, 21 bp, synthetic construct
  source 1..21: mol_type = other DNA
aggtgacatgggaagtccagg

SEQ ID NO: 553 - DNA, 21 bp, synthetic construct
  source 1..21: mol_type = other DNA
cctttgttcctgcaggagatc

SEQ ID NO: 554 - DNA, 21 bp, synthetic construct
  source 1..21: mol_type = other DNA
ttcctgcaggagatcgagggt

SEQ ID NO: 555 - DNA, 21 bp, synthetic construct
  source 1..21: mol_type = other DNA
gtccttgtggacctgggtggc

SEQ ID NO: 556 - DNA, 21 bp, synthetic construct
  source 1..21: mol_type = other DNA
accctttggtccttgtggacc

SEQ ID NO: 557 - DNA, 21 bp, synthetic construct
  source 1..21: mol_type = other DNA
ttacccacgctgcctttttga

SEQ ID NO: 558 - DNA, 21 bp, synthetic construct
  source 1..21: mol_type = other DNA
ggagatcctggcatggaaggc

SEQ ID NO: 559 - DNA, 21 bp, synthetic construct
  source 1..21: mol_type = other DNA
tctccagatccaggaggccct

SEQ ID NO: 560 - DNA, 21 bp, synthetic construct
  source 1..21: mol_type = other DNA
ccctttctctccagatccagg

SEQ ID NO: 561 - DNA, 21 bp, synthetic construct
  source 1..21: mol_type = other DNA
tcctcaggggctgctggtgaa

SEQ ID NO: 562 - DNA, 21 bp, synthetic construct
  source 1..21: mol_type = other DNA
ggacccacagaacctgggaca

SEQ ID NO: 563 - DNA, 21 bp, synthetic construct
  source 1..21: mol_type = other DNA
caagaagcagcaaactgacct

SEQ ID NO: 564 - DNA, 21 bp, synthetic construct
  source 1..21: mol_type = other DNA
ttctgccgggcaggtcctgta

SEQ ID NO: 565 - DNA, 21 bp, synthetic construct
  source 1..21: mol_type = other DNA
acaccaggaagtcctacttca

SEQ ID NO: 566 - DNA, 21 bp, synthetic construct
  source 1..21: mol_type = other DNA
ctttttaggtgacaaaggacc

SEQ ID NO: 567 - DNA, 21 bp, synthetic construct
  source 1..21: mol_type = other DNA
ggtcctggtggtcccattggt

SEQ ID NO: 568 - DNA, 21 bp, synthetic construct
  source 1..21: mol_type = other DNA
ggtgacaaaggaccaatggga

SEQ ID NO: 569 - DNA, 21 bp, synthetic construct
  source 1..21: mol_type = other DNA
ctttaggtgaccagggtgaga

SEQ ID NO: 570 - DNA, 21 bp, synthetic construct
  source 1..21: mol_type = other DNA
ggtgaccagggtgagaaagga

SEQ ID NO: 571 - DNA, 21 bp, synthetic construct
  source 1..21: mol_type = other DNA
tcctttgcaggcgagcctggc

SEQ ID NO: 572 - DNA, 21 bp, synthetic construct
  source 1..21: mol_type = other DNA
caggcgagcctggcatgagag

SEQ ID NO: 573 - DNA, 21 bp, synthetic construct
  source 1..21: mol_type = other DNA
gccccgggctcaccaacagca

SEQ ID NO: 574 - DNA, 21 bp, synthetic construct
  source 1..21: mol_type = other DNA
cctggtgctgttggtgagccc

SEQ ID NO: 575 - DNA, 21 bp, synthetic construct
  source 1..21: mol_type = other DNA
gaacacttacccattgctcct

SEQ ID NO: 576 - DNA, 21 bp, synthetic construct
  source 1..21: mol_type = other DNA
ccaggtcctgctggcccagac

SEQ ID NO: 577 - DNA, 21 bp, synthetic construct
  source 1..21: mol_type = other DNA
ctgggtctccagaaggtcctg

SEQ ID NO: 578 - DNA, 21 bp, synthetic construct
  source 1..21: mol_type = other DNA
tgcaggtctcacaggacccca

SEQ ID NO: 579 - DNA, 21 bp, synthetic construct
  source 1..21: mol_type = other DNA
ttcctggtcggccaggggtac

SEQ ID NO: 580 - DNA, 21 bp, synthetic construct
  source 1..21: mol_type = other DNA
gaaattcacttaccttttatt

SEQ ID NO: 581 - DNA, 21 bp, synthetic construct
  source 1..21: mol_type = other DNA
ctctcttcctaggtgaaccag

SEQ ID NO: 582 - DNA, 21 bp, synthetic construct
  source 1..21: mol_type = other DNA
agaggggtcatcgatgctcac

SEQ ID NO: 583 - DNA, 21 bp, synthetic construct
  source 1..21: mol_type = other DNA
ttcctcaaccccgtttccagg

SEQ ID NO: 584 - DNA, 21 bp, synthetic construct
  source 1..21: mol_type = other DNA
caggccctgccggcccagctg

SEQ ID NO: 585 - DNA, 21 bp, synthetic construct
  source 1..21: mol_type = other DNA
tattttcttctctctatagaa

SEQ ID NO: 586 - DNA, 21 bp, synthetic construct
  source 1..21: mol_type = other DNA
ttctctctatagaagttctta

SEQ ID NO: 587 - DNA, 21 bp, synthetic construct
  source 1..21: mol_type = other DNA
caaggtcccccaggcccaccc

SEQ ID NO: 588 - DNA, 21 bp, synthetic construct
  source 1..21: mol_type = other DNA
ctaggggagggtttgccaggc

SEQ ID NO: 589 - DNA, 21 bp, synthetic construct
  source 1..21: mol_type = other DNA
ccaggcccaccaggcccacca

SEQ ID NO: 590 - DNA, 21 bp, synthetic construct
  source 1..21: mol_type = other DNA
cttcctctgcagaaaccttcc

SEQ ID NO: 591 - DNA, 21 bp, synthetic construct
  source 1..21: mol_type = other DNA
cctcaggtcccccaggcccca

SEQ ID NO: 592 - DNA, 21 bp, synthetic construct
  source 1..21: mol_type = other DNA
atgccggctctactgtacctt

SEQ ID NO: 593 - DNA, 21 bp, synthetic construct
  source 1..21: mol_type = other DNA
ggactcaaccttcagggacca

SEQ ID NO: 594 - DNA, 21 bp, synthetic construct
  source 1..21: mol_type = other DNA
ggtccctgggggccaggtggg

SEQ ID NO: 595 - DNA, 21 bp, synthetic construct
  source 1..21: mol_type = other DNA
tcacctttgggtccctggggg

SEQ ID NO: 596 - DNA, 21 bp, synthetic construct
  source 1..21: mol_type = other DNA
gattccaggtgatccaggtgt

SEQ ID NO: 597 - DNA, 21 bp, synthetic construct
  source 1..21: mol_type = other DNA
agttcttaccttcagaaggac

SEQ ID NO: 598 - DNA, 21 bp, synthetic construct
  source 1..21: mol_type = other DNA
gtcactttcagttcttacctt

SEQ ID NO: 599 - DNA, 21 bp, synthetic construct
  source 1..21: mol_type = other DNA
tctttgctgcagggggatcat

SEQ ID NO: 600 - DNA, 21 bp, synthetic construct
  source 1..21: mol_type = other DNA
ctgcagggggatcatcaagta

SEQ ID NO: 601 - DNA, 21 bp, synthetic construct
  source 1..21: mol_type = other DNA
ctttgttccttggtcggcagg

SEQ ID NO: 602 - DNA, 21 bp, synthetic construct
  source 1..21: mol_type = other DNA
ttccttggtcggcaggtgaca

SEQ ID NO: 603 - DNA, 21 bp, synthetic construct
  source 1..21: mol_type = other DNA
gactactcagagctggcaagc

SEQ ID NO: 604 - DNA, 21 bp, synthetic construct
  source 1..21: mol_type = other DNA
ttcccgacagcttcggggtac

SEQ ID NO: 605 - DNA, 21 bp, synthetic construct
  source 1..21: mol_type = other DNA
gactatgcagagctgagtagt

SEQ ID NO: 606 - DNA, 21 bp, synthetic construct
  source 1..21: mol_type = other DNA
tttctcttccttctgcccagc

SEQ ID NO: 607 - DNA, 21 bp, synthetic construct
  source 1..21: mol_type = other DNA
tcttccttctgcccagctgcc

SEQ ID NO: 608 - DNA, 21 bp, synthetic construct
  source 1..21: mol_type = other DNA
agctgcataggttgccagggc

SEQ ID NO: 609 - DNA, 21 bp, synthetic construct
  source 1..21: mol_type = other DNA
gtgaagctgcaggagacaggg

SEQ ID NO: 610 - DNA, 21 bp, synthetic construct
  source 1..21: mol_type = other DNA
ctggagatctggattacaatg

SEQ ID NO: 611 - DNA, 21 bp, synthetic construct
  source 1..21: mol_type = other DNA
caggtcagggcctactgcaag

SEQ ID NO: 612 - DNA, 21 bp, synthetic construct
  source 1..21: mol_type = other DNA
gaagaagtccatgaggtccgc

SEQ ID NO: 613 - DNA, 21 bp, synthetic construct
  source 1..21: mol_type = other DNA
cttgcttttgcagcttatgga

SEQ ID NO: 614 - DNA, 21 bp, synthetic construct
  source 1..21: mol_type = other DNA
cccagggggtccttgaatggc

SEQ ID NO: 615 - DNA, 21 bp, synthetic construct
  source 1..21: mol_type = other DNA
cagcttatggagccattcaag

SEQ ID NO: 616 - DNA, 21 bp, synthetic construct
  source 1..21: mol_type = other DNA
ggtcctggagtgcccatctct

SEQ ID NO: 617 - DNA, 21 bp, synthetic construct
  source 1..21: mol_type = other DNA
cttccaggtgacaggggccct

SEQ ID NO: 618 - DNA, 21 bp, synthetic construct
  source 1..21: mol_type = other DNA
tcccttgtgtcctcgagggcc

SEQ ID NO: 619 - DNA, 21 bp, synthetic construct
  source 1..21: mol_type = other DNA
tctcctttttctcccttgtgt

SEQ ID NO: 620 - DNA, 21 bp, synthetic construct
  source 1..21: mol_type = other DNA
aggtgaccaagtctatgctgg

SEQ ID NO: 621 - DNA, 21 bp, synthetic construct
  source 1..21: mol_type = other DNA
cctgccagcactggatcccaa

SEQ ID NO: 622 - DNA, 21 bp, synthetic construct
  source 1..21: mol_type = other DNA
tctttcttttcctttgggatc

SEQ ID NO: 623 - DNA, 21 bp, synthetic construct
  source 1..21: mol_type = other DNA
ttttcctttgggatccagtgc

SEQ ID NO: 624 - DNA, 21 bp, synthetic construct
  source 1..21: mol_type = other DNA
ctttgggatccagtgctggca

SEQ ID NO: 625 - DNA, 21 bp, synthetic construct
  source 1..21: mol_type = other DNA
ggatccagtgctggcaggtaa

SEQ ID NO: 626 - DNA, 21 bp, synthetic construct
  source 1..21: mol_type = other DNA
tgatgataatgaatttatacc

SEQ ID NO: 627 - DNA, 21 bp, synthetic construct
  source 1..21: mol_type = other DNA
cttccaggtataaattcatta

SEQ ID NO: 628 - DNA, 21 bp, synthetic construct
  source 1..21: mol_type = other DNA
ttgtgcatttctgatgataat

SEQ ID NO: 629 - DNA, 21 bp, synthetic construct
  source 1..21: mol_type = other DNA
tagcatttcttgtgcatttct

SEQ ID NO: 630 - DNA, 21 bp, synthetic construct
  source 1..21: mol_type = other DNA
actctcatagcattcaagtct

SEQ ID NO: 631 - DNA, 21 bp, synthetic construct
  source 1..21: mol_type = other DNA
acacagcactccagctgaaac

SEQ ID NO: 632 - DNA, 21 bp, synthetic construct
  source 1..21: mol_type = other DNA
ctttgacacagcactccagct

SEQ ID NO: 633 - DNA, 21 bp, synthetic construct
  source 1..21: mol_type = other DNA
agctggagtgctgtgtcaaag

SEQ ID NO: 634 - DNA, 21 bp, synthetic construct
  source 1..21: mol_type = other DNA
ttatgtcagggtgcaggattt

SEQ ID NO: 635 - DNA, 21 bp, synthetic construct
  source 1..21: mol_type = other DNA
aacttactcttcagccgtggt

SEQ ID NO: 636 - DNA, 21 bp, synthetic construct
  source 1..21: mol_type = other DNA
tctatctcttgggccagggcc

SEQ ID NO: 637 - DNA, 21 bp, synthetic construct
  source 1..21: mol_type = other DNA
gtcttctacaataccaacagc

SEQ ID NO: 638 - DNA, 21 bp, synthetic construct
  source 1..21: mol_type = other DNA
ccaaccatcaaggctctgtat

SEQ ID NO: 639 - DNA, 21 bp, synthetic construct
  source 1..21: mol_type = other DNA
agcagtgggaactttaccaac

SEQ ID NO: 640 - DNA, 21 bp, synthetic construct
  source 1..21: mol_type = other DNA
tcctgaaatgtaaattgataa

SEQ ID NO: 641 - DNA, 21 bp, synthetic construct
  source 1..21: mol_type = other DNA
tcaatttacatttcaggataa

SEQ ID NO: 642 - DNA, 21 bp, synthetic construct
  source 1..21: mol_type = other DNA
catttcaggataaaagtcttc

SEQ ID NO: 643 - DNA, 21 bp, synthetic construct
  source 1..21: mol_type = other DNA
aggataaaagtcttcatgttg

SEQ ID NO: 644 - DNA, 21 bp, synthetic construct
  source 1..21: mol_type = other DNA
ctgtcccgatgatcaaaccct

SEQ ID NO: 645 - DNA, 21 bp, synthetic construct
  source 1..21: mol_type = other DNA
tcttgaagagacactttgctg

SEQ ID NO: 646 - DNA, 21 bp, synthetic construct
  source 1..21: mol_type = other DNA
atcatcgggacagcaaagtgt

SEQ ID NO: 647 - DNA, 21 bp, synthetic construct
  source 1..21: mol_type = other DNA
tcaatttacatttcaggataa

SEQ ID NO: 648 - DNA, 21 bp, synthetic construct
  source 1..21: mol_type = other DNA
catttcaggataaaagtcttc

SEQ ID NO: 649 - DNA, 21 bp, synthetic construct
  source 1..21: mol_type = other DNA
aggataaaagtcttcatgttg

SEQ ID NO: 650 - DNA, 21 bp, synthetic construct
  source 1..21: mol_type = other DNA
ctgtcccgatgatcaaaccct

SEQ ID NO: 651 - DNA, 21 bp, synthetic construct
  source 1..21: mol_type = other DNA
tcttgaagagacactttgctg

SEQ ID NO: 652 - DNA, 21 bp, synthetic construct
  source 1..21: mol_type = other DNA
atcatcgggacagcaaagtgt

SEQ ID NO: 653 - DNA, 21 bp, synthetic construct
  source 1..21: mol_type = other DNA
ttgttctcacaggttcccaat

SEQ ID NO: 654 - DNA, 21 bp, synthetic construct
  source 1..21: mol_type = other DNA
tcataagcaggtggagcattg

SEQ ID NO: 655 - DNA, 21 bp, synthetic construct
  source 1..21: mol_type = other DNA
tctctggcctggtactggcta

SEQ ID NO: 656 - DNA, 21 bp, synthetic construct
  source 1..21: mol_type = other DNA
ccctttagtgagccccttcaa

SEQ ID NO: 657 - DNA, 21 bp, synthetic construct
  source 1..21: mol_type = other DNA
gtgagccccttcaagatacct

SEQ ID NO: 658 - DNA, 21 bp, synthetic construct
  source 1..21: mol_type = other DNA
tgaattgcaataccagcatca

SEQ ID NO: 659 - DNA, 21 bp, synthetic construct
  source 1..21: mol_type = other DNA
ccaggtccagtcttgtaatgt

SEQ ID NO: 660 - DNA, 21 bp, synthetic construct
  source 1..21: mol_type = other DNA
tccttgtatatatctgtccca

SEQ ID NO: 661 - DNA, 21 bp, synthetic construct
  source 1..21: mol_type = other DNA
ggagtcttctgctttgctgga

SEQ ID NO: 662 - DNA, 21 bp, synthetic construct
  source 1..21: mol_type = other DNA
ctggacatgagactggaaggc

SEQ ID NO: 663 - DNA, 21 bp, synthetic construct
  source 1..21: mol_type = other DNA
tcttctcctctcttagcccct

SEQ ID NO: 664 - DNA, 21 bp, synthetic construct
  source 1..21: mol_type = other DNA
ctccaaggtggctgtactgag

SEQ ID NO: 665 - DNA, 21 bp, synthetic construct
  source 1..21: mol_type = other DNA
ccggaggacagagactgacat

SEQ ID NO: 666 - DNA, 21 bp, synthetic construct
  source 1..21: mol_type = other DNA
tcatttcaggaaaccacttgg

SEQ ID NO: 667 - DNA, 21 bp, synthetic construct
  source 1..21: mol_type = other DNA
aggaaaccacttggttaaggt

SEQ ID NO: 668 - DNA, 21 bp, synthetic construct
  source 1..21: mol_type = other DNA
gcttctgcatcacaagtcaga

SEQ ID NO: 669 - DNA, 21 bp, synthetic construct
  source 1..21: mol_type = other DNA
aaccatgtgatatttttggct

SEQ ID NO: 670 - DNA, 21 bp, synthetic construct
  source 1..21: mol_type = other DNA
tcttcagttaggaagccgatc

SEQ ID NO: 671 - DNA, 21 bp, synthetic construct
  source 1..21: mol_type = other DNA
aagatgggaagatgatcggct

SEQ ID NO: 672 - DNA, 21 bp, synthetic construct
  source 1..21: mol_type = other DNA
cactgatacatccctcgaggg

SEQ ID NO: 673 - DNA, 21 bp, synthetic construct
  source 1..21: mol_type = other DNA
acttgttctgtgatcctttac

SEQ ID NO: 674 - DNA, 21 bp, synthetic construct
  source 1..21: mol_type = other DNA
tctctccttttccctacagtg

SEQ ID NO: 675 - DNA, 21 bp, synthetic construct
  source 1..21: mol_type = other DNA
gttcaatgcagttctgacaca

SEQ ID NO: 676 - DNA, 21 bp, synthetic construct
  source 1..21: mol_type = other DNA
cctacagtgtgtcagaactgc

SEQ ID NO: 677 - DNA, 21 bp, synthetic construct
  source 1..21: mol_type = other DNA
agcaaagagaaagccagatat

SEQ ID NO: 678 - DNA, 21 bp, synthetic construct
  source 1..21: mol_type = other DNA
tctttgctgaaatcgtcagca

SEQ ID NO: 679 - DNA, 21 bp, synthetic construct
  source 1..21: mol_type = other DNA
ctgaaatcgtcagcattttcg

SEQ ID NO: 680 - DNA, 21 bp, synthetic construct
  source 1..21: mol_type = other DNA
gtccttgctgttggggtctac

SEQ ID NO: 681 - DNA, 21 bp, synthetic construct
  source 1..21: mol_type = other DNA
cctctcgactggcgaactcca

SEQ ID NO: 682 - DNA, 21 bp, synthetic construct
  source 1..21: mol_type = other DNA
ttttttgtgcagcttcagaca

SEQ ID NO: 683 - DNA, 21 bp, synthetic construct
  source 1..21: mol_type = other DNA
tgcagcttcagacaagcagac

SEQ ID NO: 684 - DNA, 21 bp, synthetic construct
  source 1..21: mol_type = other DNA
ttcttcatccccttacctggt

SEQ ID NO: 685 - DNA, 21 bp, synthetic construct
  source 1..21: mol_type = other DNA
cagcccctcaaggatcgagaa

SEQ ID NO: 686 - DNA, 21 bp, synthetic construct
  source 1..21: mol_type = other DNA
cttgaaggtggctgtactggt

SEQ ID NO: 687 - DNA, 21 bp, synthetic construct
  source 1..21: mol_type = other DNA
caggtactttggcccagtcaa

SEQ ID NO: 688 - DNA, 21 bp, synthetic construct
  source 1..21: mol_type = other DNA
tgagggaaaggacaagatgaa

SEQ ID NO: 689 - DNA, 21 bp, synthetic construct
  source 1..21: mol_type = other DNA
accgcggccatcctgcaggca

SEQ ID NO: 690 - DNA, 21 bp, synthetic construct
  source 1..21: mol_type = other DNA
tctcttggcacagaggcacag

SEQ ID NO: 691 - DNA, 21 bp, synthetic construct
  source 1..21: mol_type = other DNA
ggatccagcaggccaaagctc

SEQ ID NO: 692 - DNA, 21 bp, synthetic construct
  source 1..21: mol_type = other DNA
gcctgctggatcccaaactct

SEQ ID NO: 693 - DNA, 21 bp, synthetic construct
  source 1..21: mol_type = other DNA
ctttctgtgttgcagttcagc

SEQ ID NO: 694 - DNA, 21 bp, synthetic construct
  source 1..21: mol_type = other DNA
tgtgttgcagttcagcaggag

SEQ ID NO: 695 - DNA, 21 bp, synthetic construct
  source 1..21: mol_type = other DNA
ttatctgttataggagctcaa

SEQ ID NO: 696 - DNA, 21 bp, synthetic construct
  source 1..21: mol_type = other DNA
cccccatctcagggtcccggc

SEQ ID NO: 697 - DNA, 21 bp, synthetic construct
  source 1..21: mol_type = other DNA
gacaagagacgtggccgggac

SEQ ID NO: 698 - DNA, 21 bp, synthetic construct
  source 1..21: mol_type = other DNA
ctagcagagaaggaagaaccc

SEQ ID NO: 699 - DNA, 21 bp, synthetic construct
  source 1..21: mol_type = other DNA
atcccaatctcactgtaggcc

SEQ ID NO: 700 - DNA, 21 bp, synthetic construct
  source 1..21: mol_type = other DNA
actcccaaacaaccagcgccg

SEQ ID NO: 701 - DNA, 21 bp, synthetic construct
  source 1..21: mol_type = other DNA
tgatttgctttcacgccaggg

SEQ ID NO: 702 - DNA, 21 bp, synthetic construct
  source 1..21: mol_type = other DNA
ctttcacgccagggtctcagt

SEQ ID NO: 703 - DNA, 21 bp, synthetic construct
  source 1..21: mol_type = other DNA
acgccagggtctcagtacagc

SEQ ID NO: 704 - DNA, 21 bp, synthetic construct
  source 1..21: mol_type = other DNA
ctggcgccgttgacgcgcacg

SEQ ID NO: 705 - DNA, 21 bp, synthetic construct
  source 1..21: mol_type = other DNA
ttgtgctgcatacggagccgc

SEQ ID NO: 706 - DNA, 21 bp, synthetic construct
  source 1..21: mol_type = other DNA
atgtggctgagttggaccagt

SEQ ID NO: 707 - DNA, 21 bp, synthetic construct
  source 1..21: mol_type = other DNA
gcatccacaccaggtggtgag

SEQ ID NO: 708 - DNA, 21 bp, synthetic construct
  source 1..21: mol_type = other DNA
actactctgaccatcagccct

SEQ ID NO: 709 - DNA, 21 bp, synthetic construct
  source 1..21: mol_type = other DNA
gggccgggacagtgtcgtata

SEQ ID NO: 710 - DNA, 21 bp, synthetic construct
  source 1..21: mol_type = other DNA
ttttttccggcgttcaagatg

SEQ ID NO: 711 - DNA, 21 bp, synthetic construct
  source 1..21: mol_type = other DNA
cggcgttcaagatgtcgaagc

SEQ ID NO: 712 - DNA, 21 bp, synthetic construct
  source 1..21: mol_type = other DNA
gcaccagaggacccaccacgt

SEQ ID NO: 713 - DNA, 21 bp, synthetic construct
  source 1..21: mol_type = other DNA
tatccacaggacgtggtgggt

SEQ ID NO: 714 - DNA, 21 bp, synthetic construct
  source 1..21: mol_type = other DNA
cttgggtcttccggtaggagc

SEQ ID NO: 715 - DNA, 21 bp, synthetic construct
  source 1..21: mol_type = other DNA
tttacattcttttgtaggagc

SEQ ID NO: 716 - DNA, 21 bp, synthetic construct
  source 1..21: mol_type = other DNA
cattcttttgtaggagccaaa

SEQ ID NO: 717 - DNA, 21 bp, synthetic construct
  source 1..21: mol_type = other DNA
taggagccaaaaacctgtata

SEQ ID NO: 718 - DNA, 21 bp, synthetic construct
  source 1..21: mol_type = other DNA
ttgactgtggccatcaccatg

SEQ ID NO: 719 - DNA, 21 bp, synthetic construct
  source 1..21: mol_type = other DNA
cctttcttgactgtggccatc

SEQ ID NO: 720 - DNA, 21 bp, synthetic construct
  source 1..21: mol_type = other DNA
tgagctctggtttgcctttct

SEQ ID NO: 721 - DNA, 21 bp, synthetic construct
  source 1..21: mol_type = other DNA
ctcacccttttttctgagctc

SEQ ID NO: 722 - DNA, 21 bp, synthetic construct
  source 1..21: mol_type = other DNA
gttgtcgaatgaccactgctg

SEQ ID NO: 723 - DNA, 21 bp, synthetic construct
  source 1..21: mol_type = other DNA
ttctctcagtacatccagcag

SEQ ID NO: 724 - DNA, 21 bp, synthetic construct
  source 1..21: mol_type = other DNA
tacggtatgactttcgttgtc

SEQ ID NO: 725 - DNA, 21 bp, synthetic construct
  source 1..21: mol_type = other DNA
ttgttcactatgactcctgca

SEQ ID NO: 726 - DNA, 21 bp, synthetic construct
  source 1..21: mol_type = other DNA
tttattttgaagataatgcag

SEQ ID NO: 727 - DNA, 21 bp, synthetic construct
  source 1..21: mol_type = other DNA
ttttgaagataatgcaggagt

SEQ ID NO: 728 - DNA, 21 bp, synthetic construct
  source 1..21: mol_type = other DNA
aagataatgcaggagtcatag

SEQ ID NO: 729 - DNA, 21 bp, synthetic construct
  source 1..21: mol_type = other DNA
atctcgcctttattgttcact

SEQ ID NO: 730 - DNA, 21 bp, synthetic construct
  source 1..21: mol_type = other DNA
ctacctttcatctcgccttta

SEQ ID NO: 731 - DNA, 21 bp, synthetic construct
  source 1..21: mol_type = other DNA
ttttatttttttaatgcaggt

SEQ ID NO: 732 - DNA, 21 bp, synthetic construct
  source 1..21: mol_type = other DNA
tttttttaatgcaggttctgc

SEQ ID NO: 733 - DNA, 21 bp, synthetic construct
  source 1..21: mol_type = other DNA
ctactggtcctgtaatggcag

SEQ ID NO: 734 - DNA, 21 bp, synthetic construct
  source 1..21: mol_type = other DNA
atgcaggttctgccattacag

SEQ ID NO: 735 - DNA, 21 bp, synthetic construct
  source 1..21: mol_type = other DNA
caaatatactggagaatcatg

SEQ ID NO: 736 - DNA, 21 bp, synthetic construct
  source 1..21: mol_type = other DNA
ccttccctttatatccacagg

SEQ ID NO: 737 - DNA, 21 bp, synthetic construct
  source 1..21: mol_type = other DNA
ggccctcgaatcgagttctcc

SEQ ID NO: 738 - DNA, 21 bp, synthetic construct
  source 1..21: mol_type = other DNA
gtgtatcctggggtgggaggc

SEQ ID NO: 739 - DNA, 21 bp, synthetic construct
  source 1..21: mol_type = other DNA
tttctctgatttttagctaaa

SEQ ID NO: 740 - DNA, 21 bp, synthetic construct
  source 1..21: mol_type = other DNA
tctgatttttagctaaaagat

SEQ ID NO: 741 - DNA, 21 bp, synthetic construct
  source 1..21: mol_type = other DNA
accacattatctgtaagtagg

SEQ ID NO: 742 - DNA, 21 bp, synthetic construct
  source 1..21: mol_type = other DNA
atttcaccacattatctgtaa

SEQ ID NO: 743 - DNA, 21 bp, synthetic construct
  source 1..21: mol_type = other DNA
gctaaaagatacctacttaca

SEQ ID NO: 744 - DNA, 21 bp, synthetic construct
  source 1..21: mol_type = other DNA
ttgaaattcttttaatttcac

SEQ ID NO: 745 - DNA, 21 bp, synthetic construct
  source 1..21: mol_type = other DNA
ttttgttgaaattcttttaat

SEQ ID NO: 746 - DNA, 21 bp, synthetic construct
  source 1..21: mol_type = other DNA
aacaaaagaaagtggctgttg

SEQ ID NO: 747 - DNA, 21 bp, synthetic construct
  source 1..21: mol_type = other DNA
gtgccagaaagattacatgca

SEQ ID NO: 748 - DNA, 21 bp, synthetic construct
  source 1..21: mol_type = other DNA
aagtttctaaaatacgtttct

SEQ ID NO: 749 - DNA, 21 bp, synthetic construct
  source 1..21: mol_type = other DNA
tttttcaagtttctaaaatac

SEQ ID NO: 750 - DNA, 21 bp, synthetic construct
  source 1..21: mol_type = other DNA
ttccagaaacgtattttagaa

SEQ ID NO: 751 - DNA, 21 bp, synthetic construct
  source 1..21: mol_type = other DNA
gaaacttgaaaaagaaactga

SEQ ID NO: 752 - DNA, 21 bp, synthetic construct
  source 1..21: mol_type = other DNA
gccagttccacatggtcccga

SEQ ID NO: 753 - DNA, 21 bp, synthetic construct
  source 1..21: mol_type = other DNA
tgtgagtctcgggaccatgtg

SEQ ID NO: 754 - DNA, 21 bp, synthetic construct
  source 1..21: mol_type = other DNA
attaccaggtaccatgcagag

SEQ ID NO: 755 - DNA, 21 bp, synthetic construct
  source 1..21: mol_type = other DNA
tactcccccaaagtgaaattt

SEQ ID NO: 756 - DNA, 21 bp, synthetic construct
  source 1..21: mol_type = other DNA
actttgggggagtataaattt

SEQ ID NO: 757 - DNA, 21 bp, synthetic construct
  source 1..21: mol_type = other DNA
ggggagtataaatttggaccg

SEQ ID NO: 758 - DNA, 21 bp, synthetic construct
  source 1..21: mol_type = other DNA
gaccgctttttgtgaggttgt

SEQ ID NO: 759 - DNA, 21 bp, synthetic construct
  source 1..21: mol_type = other DNA
tgaggttgtgttacgagttgg

SEQ ID NO: 760 - DNA, 21 bp, synthetic construct
  source 1..21: mol_type = other DNA
atgagctccactgcagattcc

SEQ ID NO: 761 - DNA, 21 bp, synthetic construct
  source 1..21: mol_type = other DNA
cgaggtttcttctcagactcc

SEQ ID NO: 762 - DNA, 21 bp, synthetic construct
  source 1..21: mol_type = other DNA
ttctcagactccacatcattc

SEQ ID NO: 763 - DNA, 21 bp, synthetic construct
  source 1..21: mol_type = other DNA
ataaataacatatccatcaaa

SEQ ID NO: 764 - DNA, 21 bp, synthetic construct
  source 1..21: mol_type = other DNA
cctttgataaataacatatcc

SEQ ID NO: 765 - DNA, 21 bp, synthetic construct
  source 1..21: mol_type = other DNA
tatttgcctttgataaataac

SEQ ID NO: 766 - DNA, 21 bp, synthetic construct
  source 1..21: mol_type = other DNA
atggatatgttatttatcaaa

SEQ ID NO: 767 - DNA, 21 bp, synthetic construct
  source 1..21: mol_type = other DNA
tcaaaggcaaatataaaagta

SEQ ID NO: 768 - DNA, 21 bp, synthetic construct
  source 1..21: mol_type = other DNA
atctctatcaatacttgcaaa

SEQ ID NO: 769 - DNA, 21 bp, synthetic construct
  source 1..21: mol_type = other DNA
gcaggtgctttgcaagtattg

SEQ ID NO: 770 - DNA, 21 bp, synthetic construct
  source 1..21: mol_type = other DNA
caagtattgatagagatgaaa

SEQ ID NO: 771 - DNA, 21 bp, synthetic construct
  source 1..21: mol_type = other DNA
gtgaacttcacatcttggttt

SEQ ID NO: 772 - DNA, 21 bp, synthetic construct
  source 1..21: mol_type = other DNA
tagcaaattgcaaaagcaaga

SEQ ID NO: 773 - DNA, 21 bp, synthetic construct
  source 1..21: mol_type = other DNA
caatttgctacaaactggtaa

SEQ ID NO: 774 - DNA, 21 bp, synthetic construct
  source 1..21: mol_type = other DNA
aaagactcagggctattctgt

SEQ ID NO: 775 - DNA, 21 bp, synthetic construct
  source 1..21: mol_type = other DNA
agtagagcttcttctcttaat

SEQ ID NO: 776 - DNA, 21 bp, synthetic construct
  source 1..21: mol_type = other DNA
aaaatctgtactacattaaga

SEQ ID NO: 777 - DNA, 21 bp, synthetic construct
  source 1..21: mol_type = other DNA
tcctttgagtagagcttcttc

SEQ ID NO: 778 - DNA, 21 bp, synthetic construct
  source 1..21: mol_type = other DNA
cctgattcagagctaatgcca

SEQ ID NO: 779 - DNA, 21 bp, synthetic construct
  source 1..21: mol_type = other DNA
gctgtggcattagctctgaat

SEQ ID NO: 780 - DNA, 21 bp, synthetic construct
  source 1..21: mol_type = other DNA
tttctcttccttctagaatga

SEQ ID NO: 781 - DNA, 21 bp, synthetic construct
  source 1..21: mol_type = other DNA
tcttccttctagaatgagatg

SEQ ID NO: 782 - DNA, 21 bp, synthetic construct
  source 1..21: mol_type = other DNA
agaaaaaatggacacagcttt

SEQ ID NO: 783 - DNA, 21 bp, synthetic construct
  source 1..21: mol_type = other DNA
tggattcatgatttgagaaaa

SEQ ID NO: 784 - DNA, 21 bp, synthetic construct
  source 1..21: mol_type = other DNA
tcaaatcatgaatccagaaag

SEQ ID NO: 785 - DNA, 21 bp, synthetic construct
  source 1..21: mol_type = other DNA
actggatatggattataatct

SEQ ID NO: 786 - DNA, 21 bp, synthetic construct
  source 1..21: mol_type = other DNA
caacatatttgactggatatg

SEQ ID NO: 787 - DNA, 21 bp, synthetic construct
  source 1..21: mol_type = other DNA
tcaggttttccaacatatttg

SEQ ID NO: 788 - DNA, 21 bp, synthetic construct
  source 1..21: mol_type = other DNA
gagtctttatcaggttttcca

SEQ ID NO: 789 - DNA, 21 bp, synthetic construct
  source 1..21: mol_type = other DNA
cttctgcagcattttttagag

SEQ ID NO: 790 - DNA, 21 bp, synthetic construct
  source 1..21: mol_type = other DNA
ataaatttccttctgcagcat

SEQ ID NO: 791 - DNA, 21 bp, synthetic construct
  source 1..21: mol_type = other DNA
acaaattttgataaatttcct

SEQ ID NO: 792 - DNA, 21 bp, synthetic construct
  source 1..21: mol_type = other DNA
tcaaaatttgtgaaaagacat

SEQ ID NO: 793 - DNA, 21 bp, synthetic construct
  source 1..21: mol_type = other DNA
tgaaaagacatgtgttctcgg

SEQ ID NO: 794 - DNA, 21 bp, synthetic construct
  source 1..21: mol_type = other DNA
tgcagcacttgcatactcacc

SEQ ID NO: 795 - DNA, 21 bp, synthetic construct
  source 1..21: mol_type = other DNA
cagctggccaaagtgagggaa

SEQ ID NO: 796 - DNA, 21 bp, synthetic construct
  source 1..21: mol_type = other DNA
gccacaagggcaggcacatcc

SEQ ID NO: 797 - DNA, 21 bp, synthetic construct
  source 1..21: mol_type = other DNA
atgagatctatgggacactgc

SEQ ID NO: 798 - DNA, 21 bp, synthetic construct
  source 1..21: mol_type = other DNA
ctgtccctgggggtgtggcag

SEQ ID NO: 799 - DNA, 21 bp, synthetic construct
  source 1..21: mol_type = other DNA
gatgctgtgctctgccacacc

SEQ ID NO: 800 - DNA, 21 bp, synthetic construct
  source 1..21: mol_type = other DNA
atagcaacgtgtgagatttcc

SEQ ID NO: 801 - DNA, 21 bp, synthetic construct
  source 1..21: mol_type = other DNA
ttccaaggtctgctagaacca

SEQ ID NO: 802 - DNA, 21 bp, synthetic construct
  source 1..21: mol_type = other DNA
aatttcatttatttctttatt

SEQ ID NO: 803 - DNA, 21 bp, synthetic construct
  source 1..21: mol_type = other DNA
gcatagcattcaatacctgaa

SEQ ID NO: 804 - DNA, 21 bp, synthetic construct
  source 1..21: mol_type = other DNA
atttatttctttattttcagg

SEQ ID NO: 805 - DNA, 21 bp, synthetic construct
  source 1..21: mol_type = other DNA
tttctttattttcaggtattg

SEQ ID NO: 806 - DNA, 21 bp, synthetic construct
  source 1..21: mol_type = other DNA
tttattttcaggtattgaatg

SEQ ID NO: 807 - DNA, 21 bp, synthetic construct
  source 1..21: mol_type = other DNA
ttttcaggtattgaatgctat

SEQ ID NO: 808 - DNA, 21 bp, synthetic construct
  source 1..21: mol_type = other DNA
aggtattgaatgctatgctaa

SEQ ID NO: 809 - DNA, 21 bp, synthetic construct
  source 1..21: mol_type = other DNA
atattaacatctgcttccaac

SEQ ID NO: 810 - DNA, 21 bp, synthetic construct
  source 1..21: mol_type = other DNA
ttggaagcagatgttaatatt

SEQ ID NO: 811 - DNA, 21 bp, synthetic construct
  source 1..21: mol_type = other DNA
tcttagttgcttcactagttt

SEQ ID NO: 812 - DNA, 21 bp, synthetic construct
  source 1..21: mol_type = other DNA
tgatggtggttggtgattggg

SEQ ID NO: 813 - DNA, 21 bp, synthetic construct
  source 1..21: mol_type = other DNA
ttaagaccagatgccatctct

SEQ ID NO: 814 - DNA, 21 bp, synthetic construct
  source 1..21: mol_type = other DNA
ttttgttaagaccagatgcca

SEQ ID NO: 815 - DNA, 21 bp, synthetic construct
  source 1..21: mol_type = other DNA
aatacagcatgctgaatcatt

SEQ ID NO: 816 - DNA, 21 bp, synthetic construct
  source 1..21: mol_type = other DNA
tttttaatttatttttggtat

SEQ ID NO: 817 - DNA, 21 bp, synthetic construct
  source 1..21: mol_type = other DNA
atttatttttggtatttagct

SEQ ID NO: 818 - DNA, 21 bp, synthetic construct
  source 1..21: mol_type = other DNA
tttttggtatttagcttgtag

SEQ ID NO: 819 - DNA, 21 bp, synthetic construct
  source 1..21: mol_type = other DNA
gtatttagcttgtagaccctg

SEQ ID NO: 820 - DNA, 21 bp, synthetic construct
  source 1..21: mol_type = other DNA
gtgggtgtccatgccttaact

SEQ ID NO: 821 - DNA, 21 bp, synthetic construct
  source 1..21: mol_type = other DNA
gcttgtagaccctggagttaa

SEQ ID NO: 822 - DNA, 21 bp, synthetic construct
  source 1..21: mol_type = other DNA
ctttagtgggtgtccatgcct

SEQ ID NO: 823 - DNA, 21 bp, synthetic construct
  source 1..21: mol_type = other DNA
ttttcctttagtgggtgtcca

SEQ ID NO: 824 - DNA, 21 bp, synthetic construct
  source 1..21: mol_type = other DNA
ccactcccttgcaatccaaca

SEQ ID NO: 825 - DNA, 21 bp, synthetic construct
  source 1..21: mol_type = other DNA
aacatgttgttgttttaccac

SEQ ID NO: 826 - DNA, 21 bp, synthetic construct
  source 1..21: mol_type = other DNA
ttggattgcaagggagtggta

SEQ ID NO: 827 - DNA, 21 bp, synthetic construct
  source 1..21: mol_type = other DNA
ctctggtaataatatgctagc

SEQ ID NO: 828 - DNA, 21 bp, synthetic construct
  source 1..21: mol_type = other DNA
aatcttttctcacccagctag

SEQ ID NO: 829 - DNA, 21 bp, synthetic construct
  source 1..21: mol_type = other DNA
tcacccagctagcatattatt

SEQ ID NO: 830 - DNA, 21 bp, synthetic construct
  source 1..21: mol_type = other DNA
atatgtgcagacacattcaga

SEQ ID NO: 831 - DNA, 21 bp, synthetic construct
  source 1..21: mol_type = other DNA
ttttcaagtttgaggattcat

SEQ ID NO: 832 - DNA, 21 bp, synthetic construct
  source 1..21: mol_type = other DNA
aagtttgaggattcatgaact

SEQ ID NO: 833 - DNA, 21 bp, synthetic construct
  source 1..21: mol_type = other DNA
aggattcatgaactctttatc

SEQ ID NO: 834 - DNA, 21 bp, synthetic construct
  source 1..21: mol_type = other DNA
gttggtcaaaagcccctggaa

SEQ ID NO: 835 - DNA, 21 bp, synthetic construct
  source 1..21: mol_type = other DNA
tcttccaggggcttttgacca

SEQ ID NO: 836 - DNA, 21 bp, synthetic construct
  source 1..21: mol_type = other DNA
gtagcattctgttttagttgg

SEQ ID NO: 837 - DNA, 21 bp, synthetic construct
  source 1..21: mol_type = other DNA
accaactaaaacagaatgcta

SEQ ID NO: 838 - DNA, 21 bp, synthetic construct
  source 1..21: mol_type = other DNA
tgtatagctatataacatgga

SEQ ID NO: 839 - DNA, 21 bp, synthetic construct
  source 1..21: mol_type = other DNA
ttaaatcatttgtccatgtta

SEQ ID NO: 840 - DNA, 21 bp, synthetic construct
  source 1..21: mol_type = other DNA
tccatgttatatagctataca

SEQ ID NO: 841 - DNA, 21 bp, synthetic construct
  source 1..21: mol_type = other DNA
tctactccttcagaagcaatg

SEQ ID NO: 842 - DNA, 21 bp, synthetic construct
  source 1..21: mol_type = other DNA
aatttctctactccttcagaa

SEQ ID NO: 843 - DNA, 21 bp, synthetic construct
  source 1..21: mol_type = other DNA
atttttaaatttctctactcc

SEQ ID NO: 844 - DNA, 21 bp, synthetic construct
  source 1..21: mol_type = other DNA
aaaattttcatttttaaattt

SEQ ID NO: 845 - DNA, 21 bp, synthetic construct
  source 1..21: mol_type = other DNA
aaaatgaaaattttgaaatta

SEQ ID NO: 846 - DNA, 21 bp, synthetic construct
  source 1..21: mol_type = other DNA
tggcggccacttgtatcaaca

SEQ ID NO: 847 - DNA, 21 bp, synthetic construct
  source 1..21: mol_type = other DNA
aaattattattgttgatacaa

SEQ ID NO: 848 - DNA, 21 bp, synthetic construct
  source 1..21: mol_type = other DNA
ttcaaacaaagagtcttcttg

SEQ ID NO: 849 - DNA, 21 bp, synthetic construct
  source 1..21: mol_type = other DNA
tttgaagaaatgcttcaagtt

SEQ ID NO: 850 - DNA, 21 bp, synthetic construct
  source 1..21: mol_type = other DNA
aagaaatgcttcaagttgcta

SEQ ID NO: 851 - DNA, 21 bp, synthetic construct
  source 1..21: mol_type = other DNA
tatttaaactttctagcaacc

SEQ ID NO: 852 - DNA, 21 bp, synthetic construct
  source 1..21: mol_type = other DNA
aactttctagcaacctgataa

SEQ ID NO: 853 - DNA, 21 bp, synthetic construct
  source 1..21: mol_type = other DNA
tagcaacctgataacattgtt

SEQ ID NO: 854 - DNA, 21 bp, synthetic construct
  source 1..21: mol_type = other DNA
tgtgatggatgcctccattgg

SEQ ID NO: 855 - DNA, 21 bp, synthetic construct
  source 1..21: mol_type = other DNA
aaagccttagcctgggcttca

SEQ ID NO: 856 - DNA, 21 bp, synthetic construct
  source 1..21: mol_type = other DNA
tctttaaaagccttagcctgg

SEQ ID NO: 857 - DNA, 21 bp, synthetic construct
  source 1..21: mol_type = other DNA
tcactattactgaggctacat

SEQ ID NO: 858 - DNA, 21 bp, synthetic construct
  source 1..21: mol_type = other DNA
aagataaagtagatgtagcct

SEQ ID NO: 859 - DNA, 21 bp, synthetic construct
  source 1..21: mol_type = other DNA
catggccatcaagttttgtca

SEQ ID NO: 860 - DNA, 21 bp, synthetic construct
  source 1..21: mol_type = other DNA
tggcagcgactctggaaaaaa

SEQ ID NO: 861 - DNA, 21 bp, synthetic construct
  source 1..21: mol_type = other DNA
tattttctttttttttccaga

SEQ ID NO: 862 - DNA, 21 bp, synthetic construct
  source 1..21: mol_type = other DNA
tttttttttccagagtcgctg

SEQ ID NO: 863 - DNA, 21 bp, synthetic construct
  source 1..21: mol_type = other DNA
cagagtcgctgccacaaaaag

SEQ ID NO: 864 - DNA, 21 bp, synthetic construct
  source 1..21: mol_type = other DNA
attggtacaggggaacatata

SEQ ID NO: 865 - DNA, 21 bp, synthetic construct
  source 1..21: mol_type = other DNA
aaaggttcaaagtcatctata

SEQ ID NO: 866 - DNA, 21 bp, synthetic construct
  source 1..21: mol_type = other DNA
ctaataaaaggctgtgttttg

SEQ ID NO: 867 - DNA, 21 bp, synthetic construct
  source 1..21: mol_type = other DNA
aacctttcaaaacacagcctt

SEQ ID NO: 868 - DNA, 21 bp, synthetic construct
  source 1..21: mol_type = other DNA
aaaacacagccttttattagc

SEQ ID NO: 869 - DNA, 21 bp, synthetic construct
  source 1..21: mol_type = other DNA
ttttttgtatcttataggtat

SEQ ID NO: 870 - DNA, 21 bp, synthetic construct
  source 1..21: mol_type = other DNA
tatcttataggtatgggcgac

SEQ ID NO: 871 - DNA, 21 bp, synthetic construct
  source 1..21: mol_type = other DNA
tctatcagtccttcaatgtcg

SEQ ID NO: 872 - DNA, 21 bp, synthetic construct
  source 1..21: mol_type = other DNA
aacttctctataagtgcttca

SEQ ID NO: 873 - DNA, 21 bp, synthetic construct
  source 1..21: mol_type = other DNA
cattgtatttcaggtcagttt

SEQ ID NO: 874 - DNA, 21 bp, synthetic construct
  source 1..21: mol_type = other DNA
aaattgctcatacatgtctcg

SEQ ID NO: 875 - DNA, 21 bp, synthetic construct
  source 1..21: mol_type = other DNA
aggtcagtttacgttgcgaga

SEQ ID NO: 876 - DNA, 21 bp, synthetic construct
  source 1..21: mol_type = other DNA
atgatattttgaaattgctca

SEQ ID NO: 877 - DNA, 21 bp, synthetic construct
  source 1..21: mol_type = other DNA
cgttgcgagacatgtatgagc

SEQ ID NO: 878 - DNA, 21 bp, synthetic construct
  source 1..21: mol_type = other DNA
aaaatatcatgaaaatgggcc

SEQ ID NO: 879 - DNA, 21 bp, synthetic construct
  source 1..21: mol_type = other DNA
tgtttaaatctgttgtagggg

SEQ ID NO: 880 - DNA, 21 bp, synthetic construct
  source 1..21: mol_type = other DNA
aatctgttgtaggggatgatc

SEQ ID NO: 881 - DNA, 21 bp, synthetic construct
  source 1..21: mol_type = other DNA
ctcataaaatctgtcccaaaa

SEQ ID NO: 882 - DNA, 21 bp, synthetic construct
  source 1..21: mol_type = other DNA
ctttgctcataaaatctgtcc

SEQ ID NO: 883 - DNA, 21 bp, synthetic construct
  source 1..21: mol_type = other DNA
ggacagattttatgagcaaag

SEQ ID NO: 884 - DNA, 21 bp, synthetic construct
  source 1..21: mol_type = other DNA
gccttgccattgactcctgtt

SEQ ID NO: 885 - DNA, 21 bp, synthetic construct
  source 1..21: mol_type = other DNA
tgagcaaaggaaatgaacagg

SEQ ID NO: 886 - DNA, 21 bp, synthetic construct
  source 1..21: mol_type = other DNA
tttagccttgccattgactcc

SEQ ID NO: 887 - DNA, 21 bp, synthetic construct
  source 1..21: mol_type = other DNA
gcaccatccgtactgtctagt

SEQ ID NO: 888 - DNA, 21 bp, synthetic construct
  source 1..21: mol_type = other DNA
ctaaaaactttggcaccatcc

SEQ ID NO: 889 - DNA, 21 bp, synthetic construct
  source 1..21: mol_type = other DNA
gattcttcctggttgtttact

SEQ ID NO: 890 - DNA, 21 bp, synthetic construct
  source 1..21: mol_type = other DNA
gtaaacaaccaggaagaatcc

SEQ ID NO: 891 - DNA, 21 bp, synthetic construct
  source 1..21: mol_type = other DNA
ccatctgtgcaaacttggtat

SEQ ID NO: 892 - DNA, 21 bp, synthetic construct
  source 1..21: mol_type = other DNA
acacaatataccaagtttgca

SEQ ID NO: 893 - DNA, 21 bp, synthetic construct
  source 1..21: mol_type = other DNA
atacctcccatcttttttacc

SEQ ID NO: 894 - DNA, 21 bp, synthetic construct
  source 1..21: mol_type = other DNA
cacagatggtaaaaaagatgg

SEQ ID NO: 895 - DNA, 21 bp, synthetic construct
  source 1..21: mol_type = other DNA
aaaagtcctttgatacctccc

SEQ ID NO: 896 - DNA, 21 bp, synthetic construct
  source 1..21: mol_type = other DNA
ccctcaggtggcgacatgtct

SEQ ID NO: 897 - DNA, 21 bp, synthetic construct
  source 1..21: mol_type = other DNA
ccatctgtgactggctcacat

SEQ ID NO: 898 - DNA, 21 bp, synthetic construct
  source 1..21: mol_type = other DNA
ttggttcaattttgccatctg

SEQ ID NO: 899 - DNA, 21 bp, synthetic construct
  source 1..21: mol_type = other DNA
gccatttgttggttcaatttt

SEQ ID NO: 900 - DNA, 21 bp, synthetic construct
  source 1..21: mol_type = other DNA
actctacttccctacttttgc

SEQ ID NO: 901 - DNA, 21 bp, synthetic construct
  source 1..21: mol_type = other DNA
ctctaggtggtatggcaggac

SEQ ID NO: 902 - DNA, 21 bp, synthetic construct
  source 1..21: mol_type = other DNA
atgttgccagcagcaccctgt

SEQ ID NO: 903 - DNA, 21 bp, synthetic construct
  source 1..21: mol_type = other DNA
aacagggtgctgctggcaaca

SEQ ID NO: 904 - DNA, 21 bp, synthetic construct
  source 1..21: mol_type = other DNA
catattattgaatcccatcat

SEQ ID NO: 905 - DNA, 21 bp, synthetic construct
  source 1..21: mol_type = other DNA
tttacatattattgaatccca

SEQ ID NO: 906 - DNA, 21 bp, synthetic construct
  source 1..21: mol_type = other DNA
tattaaggcattttctttaca

SEQ ID NO: 907 - DNA, 21 bp, synthetic construct
  source 1..21: mol_type = other DNA
ctgagacctcagcgtttccct

SEQ ID NO: 908 - DNA, 21 bp, synthetic construct
  source 1..21: mol_type = other DNA
cccccaattcgcaaaaagaag

SEQ ID NO: 909 - DNA, 21 bp, synthetic construct
  source 1..21: mol_type = other DNA
ccttctttttgcgaattgggg

SEQ ID NO: 910 - DNA, 21 bp, synthetic construct
  source 1..21: mol_type = other DNA
cgaattggggggaaagtgtat

SEQ ID NO: 911 - DNA, 21 bp, synthetic construct
  source 1..21: mol_type = other DNA
ttgcttatcatgcactctttc

SEQ ID NO: 912 - DNA, 21 bp, synthetic construct
  source 1..21: mol_type = other DNA
cttttcttctcgcccgctttt

SEQ ID NO: 913 - DNA, 21 bp, synthetic construct
  source 1..21: mol_type = other DNA
ttctcgcccgcttttcccctc

SEQ ID NO: 914 - DNA, 21 bp, synthetic construct
  source 1..21: mol_type = other DNA
ccctccttttctttttccttc

SEQ ID NO: 915 - DNA, 21 bp, synthetic construct
  source 1..21: mol_type = other DNA
tcccttatattaaagggagga

SEQ ID NO: 916 - DNA, 21 bp, synthetic construct
  source 1..21: mol_type = other DNA
tttttccttccttctttcctc

SEQ ID NO: 917 - DNA, 21 bp, synthetic construct
  source 1..21: mol_type = other DNA
cttccttctttcctcccttta

SEQ ID NO: 918 - DNA, 21 bp, synthetic construct
  source 1..21: mol_type = other DNA
ctccctttaatataagggaga

SEQ ID NO: 919 - DNA, 21 bp, synthetic construct
  source 1..21: mol_type = other DNA
cacaaaaaccatgtatttctc

SEQ ID NO: 920 - DNA, 21 bp, synthetic construct
  source 1..21: mol_type = other DNA
atataagggagaaatacatgg

SEQ ID NO: 921 - DNA, 21 bp, synthetic construct
  source 1..21: mol_type = other DNA
tggaaatcattatatgtttgc

SEQ ID NO: 922 - DNA, 21 bp, synthetic construct
  source 1..21: mol_type = other DNA
ctttagattttcttctgtttt

SEQ ID NO: 923 - DNA, 21 bp, synthetic construct
  source 1..21: mol_type = other DNA
acttaagtgttatgatggtga

SEQ ID NO: 924 - DNA, 21 bp, synthetic construct
  source 1..21: mol_type = other DNA
gattttcttctgttttcacca

SEQ ID NO: 925 - DNA, 21 bp, synthetic construct
  source 1..21: mol_type = other DNA
ttctgttttcaccatcataac

SEQ ID NO: 926 - DNA, 21 bp, synthetic construct
  source 1..21: mol_type = other DNA
catcatgatttaacttaagtg

SEQ ID NO: 927 - DNA, 21 bp, synthetic construct
  source 1..21: mol_type = other DNA
accatcataacacttaagtta

SEQ ID NO: 928 - DNA, 21 bp, synthetic construct
  source 1..21: mol_type = other DNA
agtactaaaattttacatcat

SEQ ID NO: 929 - DNA, 21 bp, synthetic construct
  source 1..21: mol_type = other DNA
gtacttaaaggtttttaatta

SEQ ID NO: 930 - DNA, 21 bp, synthetic construct
  source 1..21: mol_type = other DNA
caaatgcaatgcttggccttc

SEQ ID NO: 931 - DNA, 21 bp, synthetic construct
  source 1..21: mol_type = other DNA
attatctcgaaggccaagcat

SEQ ID NO: 932 - DNA, 21 bp, synthetic construct
  source 1..21: mol_type = other DNA
actactgaccaggactgttta

SEQ ID NO: 933 - DNA, 21 bp, synthetic construct
  source 1..21: mol_type = other DNA
attgaaacattatttaactac

SEQ ID NO: 934 - DNA, 21 bp, synthetic construct
  source 1..21: mol_type = other DNA
taaacagtcctggtcagtagt

SEQ ID NO: 935 - DNA, 21 bp, synthetic construct
  source 1..21: mol_type = other DNA
cagcactttaattgaaacatt

SEQ ID NO: 936 - DNA, 21 bp, synthetic construct
  source 1..21: mol_type = other DNA
ttttacagcactttaattgaa

SEQ ID NO: 937 - DNA, 21 bp, synthetic construct
  source 1..21: mol_type = other DNA
aagtttattttacagcacttt

SEQ ID NO: 938 - DNA, 21 bp, synthetic construct
  source 1..21: mol_type = other DNA
aattaaagtgctgtaaaataa

SEQ ID NO: 939 - DNA, 21 bp, synthetic construct
  source 1..21: mol_type = other DNA
aggataactaaccaagatctg

SEQ ID NO: 940 - DNA, 21 bp, synthetic construct
  source 1..21: mol_type = other DNA
tgtgtgaattaaccattgcag

SEQ ID NO: 941 - DNA, 21 bp, synthetic construct
  source 1..21: mol_type = other DNA
atgttccattcttctgcaatg

SEQ ID NO: 942 - DNA, 21 bp, synthetic construct
  source 1..21: mol_type = other DNA
acattcacagaggattttact

SEQ ID NO: 943 - DNA, 21 bp, synthetic construct
  source 1..21: mol_type = other DNA
gggcaagatggctgttaagca

SEQ ID NO: 944 - DNA, 21 bp, synthetic construct
  source 1..21: mol_type = other DNA
ctgcttaacagccatcttgcc

SEQ ID NO: 945 - DNA, 21 bp, synthetic construct
  source 1..21: mol_type = other DNA
ttctcagttctcagtgccatc

SEQ ID NO: 946 - DNA, 21 bp, synthetic construct
  source 1..21: mol_type = other DNA
ccagtagccactaatggggaa

SEQ ID NO: 947 - DNA, 21 bp, synthetic construct
  source 1..21: mol_type = other DNA
cttggcaggagctaaggctcc

SEQ ID NO: 948 - DNA, 21 bp, synthetic construct
  source 1..21: mol_type = other DNA
tccaccccaatctcacctctc

SEQ ID NO: 949 - DNA, 21 bp, synthetic construct
  source 1..21: mol_type = other DNA
ttgcatctgagaagatcgaag

SEQ ID NO: 950 - DNA, 21 bp, synthetic construct
  source 1..21: mol_type = other DNA
ctgtgcaagatgataaactgg

SEQ ID NO: 951 - DNA, 21 bp, synthetic construct
  source 1..21: mol_type = other DNA
aagatctttgctgtgcaagat

SEQ ID NO: 952 - DNA, 21 bp, synthetic construct
  source 1..21: mol_type = other DNA
tcatcttgcacagcaaagatc

SEQ ID NO: 953 - DNA, 21 bp, synthetic construct
  source 1..21: mol_type = other DNA
atgtatcttgaatcttcctct

SEQ ID NO: 954 - DNA, 21 bp, synthetic construct
  source 1..21: mol_type = other DNA
ctggtttcatgtatcttgaat

SEQ ID NO: 955 - DNA, 21 bp, synthetic construct
  source 1..21: mol_type = other DNA
agttcttttcctggtttcatg

SEQ ID NO: 956 - DNA, 21 bp, synthetic construct
  source 1..21: mol_type = other DNA
ttcatgagcagggtaactcaa

SEQ ID NO: 957 - DNA, 21 bp, synthetic construct
  source 1..21: mol_type = other DNA
agttaccctgctcatgaacaa

SEQ ID NO: 958 - DNA, 21 bp, synthetic construct
  source 1..21: mol_type = other DNA
tctggaaccagcagtgcaatt

SEQ ID NO: 959 - DNA, 21 bp, synthetic construct
  source 1..21: mol_type = other DNA
aggtgaggcgtaagtttctct

SEQ ID NO: 960 - DNA, 21 bp, synthetic construct
  source 1..21: mol_type = other DNA
taaaacccttcaaagccatca

SEQ ID NO: 961 - DNA, 21 bp, synthetic construct
  source 1..21: mol_type = other DNA
aagggttttataaaagcacat

SEQ ID NO: 962 - DNA, 21 bp, synthetic construct
  source 1..21: mol_type = other DNA
accaccaagagttctgtatgt

SEQ ID NO: 963 - DNA, 21 bp, synthetic construct
  source 1..21: mol_type = other DNA
taaaagcacatacagaactct

SEQ ID NO: 964 - DNA, 21 bp, synthetic construct
  source 1..21: mol_type = other DNA
gctgggggtgggtcttttcac

SEQ ID NO: 965 - DNA, 21 bp, synthetic construct
  source 1..21: mol_type = other DNA
acagaattcttgcagtaacag

SEQ ID NO: 966 - DNA, 21 bp, synthetic construct
  source 1..21: mol_type = other DNA
agccaacccaggcacgcatgg

SEQ ID NO: 967 - DNA, 21 bp, synthetic construct
  source 1..21: mol_type = other DNA
aacaacggttcatcaaagcaa

SEQ ID NO: 968 - DNA, 21 bp, synthetic construct
  source 1..21: mol_type = other DNA
ccttgctttgatgaaccgttg

SEQ ID NO: 969 - DNA, 21 bp, synthetic construct
  source 1..21: mol_type = other DNA
atgaaccgttgttcaaagcca

SEQ ID NO: 970 - DNA, 21 bp, synthetic construct
  source 1..21: mol_type = other DNA
aatcaagatacgaagagagag

SEQ ID NO: 971 - DNA, 21 bp, synthetic construct
  source 1..21: mol_type = other DNA
gcatgttggatagtgcaatat

SEQ ID NO: 972 - DNA, 21 bp, synthetic construct
  source 1..21: mol_type = other DNA
ctttctgtaggttaagacaat

SEQ ID NO: 973 - DNA, 21 bp, synthetic construct
  source 1..21: mol_type = other DNA
tgtaggttaagacaattgaac

SEQ ID NO: 974 - DNA, 21 bp, synthetic construct
  source 1..21: mol_type = other DNA
aaagtgatcttccaaaagacc

SEQ ID NO: 975 - DNA, 21 bp, synthetic construct
  source 1..21: mol_type = other DNA
cagtagtttcaaagtgatctt

SEQ ID NO: 976 - DNA, 21 bp, synthetic construct
  source 1..21: mol_type = other DNA
gaagatcactttgaaactact

SEQ ID NO: 977 - DNA, 21 bp, synthetic construct
  source 1..21: mol_type = other DNA
aaactactgtaaaaatgagta

SEQ ID NO: 978 - DNA, 21 bp, synthetic construct
  source 1..21: mol_type = other DNA
tgatttccactctctgagtgg

SEQ ID NO: 979 - DNA, 21 bp, synthetic construct
  source 1..21: mol_type = other DNA
cactctctgagtggcttcact

SEQ ID NO: 980 - DNA, 21 bp, synthetic construct
  source 1..21: mol_type = other DNA
tctggggatgcatagatggac

SEQ ID NO: 981 - DNA, 21 bp, synthetic construct
  source 1..21: mol_type = other DNA
attccgtttgtctggggatgc

SEQ ID NO: 982 - DNA, 21 bp, synthetic construct
  source 1..21: mol_type = other DNA
ccaggtgtccatctatgcatc

SEQ ID NO: 983 - DNA, 21 bp, synthetic construct
  source 1..21: mol_type = other DNA
ataaaaatcaagtagcttcag

SEQ ID NO: 984 - DNA, 21 bp, synthetic construct
  source 1..21: mol_type = other DNA
caggcatcactgaagctactt

SEQ ID NO: 985 - DNA, 21 bp, synthetic construct
  source 1..21: mol_type = other DNA
gagagtggatagtagatatca

SEQ ID NO: 986 - DNA, 21 bp, synthetic construct
  source 1..21: mol_type = other DNA
tgaaaagtactttgatatcta

SEQ ID NO: 987 - DNA, 21 bp, synthetic construct
  source 1..21: mol_type = other DNA
atatctactatccactctcca

SEQ ID NO: 988 - DNA, 21 bp, synthetic construct
  source 1..21: mol_type = other DNA
ttagatttaattgctattcct

SEQ ID NO: 989 - DNA, 21 bp, synthetic construct
  source 1..21: mol_type = other DNA
catggctccaggtgcaaagtc

SEQ ID NO: 990 - DNA, 21 bp, synthetic construct
  source 1..21: mol_type = other DNA
attgctattcctgactttgca

SEQ ID NO: 991 - DNA, 21 bp, synthetic construct
  source 1..21: mol_type = other DNA
cacctggagccatggaaaatt

SEQ ID NO: 992 - DNA, 21 bp, synthetic construct
  source 1..21: mol_type = other DNA
tcggaagcagaagaggtcttg

SEQ ID NO: 993 - DNA, 21 bp, synthetic construct
  source 1..21: mol_type = other DNA
accccaagacctcttctgctt

SEQ ID NO: 994 - DNA, 21 bp, synthetic construct
  source 1..21: mol_type = other DNA
cctcctagtggtttggcaacc

SEQ ID NO: 995 - DNA, 21 bp, synthetic construct
  source 1..21: mol_type = other DNA
gcaacctggtcacaatggaat

SEQ ID NO: 996 - DNA, 21 bp, synthetic construct
  source 1..21: mol_type = other DNA
caaaaccctccttaagccaaa

SEQ ID NO: 997 - DNA, 21 bp, synthetic construct
  source 1..21: mol_type = other DNA
gcttaaggagggttttgcaaa

SEQ ID NO: 998 - DNA, 21 bp, synthetic construct
  source 1..21: mol_type = other DNA
caaaatacatggaacttatcg

SEQ ID NO: 999 - DNA, 21 bp, synthetic construct
  source 1..21: mol_type = other DNA
tccctgtttaggatgactatt

SEQ ID NO: 1000 - DNA, 21 bp, synthetic construct
  source 1..21: mol_type = other DNA
ggatgactattttttgaatgt

SEQ ID NO: 1001 - DNA, 21 bp, synthetic construct
  source 1..21: mol_type = other DNA
taattacttcaaaacacacat

SEQ ID NO: 1002 - DNA, 21 bp, synthetic construct
  source 1..21: mol_type = other DNA
aatgtgtgttttgaagtaatt

SEQ ID NO: 1003 - DNA, 21 bp, synthetic construct
  source 1..21: mol_type = other DNA
aagtaattacaaaagattcat

SEQ ID NO: 1004 - DNA, 21 bp, synthetic construct
  source 1..21: mol_type = other DNA
gagatagggcgggatgaattc

SEQ ID NO: 1005 - DNA, 21 bp, synthetic construct
  source 1..21: mol_type = other DNA
cgctggtttggagatagggcg

SEQ ID NO: 1006 - DNA, 21 bp, synthetic construct
  source 1..21: mol_type = other DNA
agtcggggtttccgctggttt

SEQ ID NO: 1007 - DNA, 21 bp, synthetic construct
  source 1..21: mol_type = other DNA
ctgtatttgagtcggggtttc

SEQ ID NO: 1008 - DNA, 21 bp, synthetic construct
  source 1..21: mol_type = other DNA
aaaaaaaacaaaagagttgaa

SEQ ID NO: 1009 - DNA, 21 bp, synthetic construct
  source 1..21: mol_type = other DNA
aactcttttgtttttttttaa

SEQ ID NO: 1010 - DNA, 21 bp, synthetic construct
  source 1..21: mol_type = other DNA
tttttttttaaagggagcttg

SEQ ID NO: 1011 - DNA, 21 bp, synthetic construct
  source 1..21: mol_type = other DNA
aagggagcttgtattttgaat

SEQ ID NO: 1012 - DNA, 21 bp, synthetic construct
  source 1..21: mol_type = other DNA
tcctcacccagaaaatccttg

SEQ ID NO: 1013 - DNA, 21 bp, synthetic construct
  source 1..21: mol_type = other DNA
aatatgctcaaggattttctg

SEQ ID NO: 1014 - DNA, 21 bp, synthetic construct
  source 1..21: mol_type = other DNA
tggaatttctcctcacccaga

SEQ ID NO: 1015 - DNA, 21 bp, synthetic construct
  source 1..21: mol_type = other DNA
tgggtgaggagaaattccaga

SEQ ID NO: 1016 - DNA, 21 bp, synthetic construct
  source 1..21: mol_type = other DNA
agtactgaattattcctttct

SEQ ID NO: 1017 - DNA, 21 bp, synthetic construct
  source 1..21: mol_type = other DNA
tatagctgaacttctttaagt

SEQ ID NO: 1018 - DNA, 21 bp, synthetic construct
  source 1..21: mol_type = other DNA
acagactgctccacaagtcat

SEQ ID NO: 1019 - DNA, 21 bp, synthetic construct
  source 1..21: mol_type = other DNA
taaacaactctacaaaacaag

SEQ ID NO: 1020 - DNA, 21 bp, synthetic construct
  source 1..21: mol_type = other DNA
ttcttgttttgtagagttgtt

SEQ ID NO: 1021 - DNA, 21 bp, synthetic construct
  source 1..21: mol_type = other DNA
tagagttgtttagaaagtgat

SEQ ID NO: 1022 - DNA, 21 bp, synthetic construct
  source 1..21: mol_type = other DNA
gaaagtgattttacatctggt

SEQ ID NO: 1023 - DNA, 21 bp, synthetic construct
  source 1..21: mol_type = other DNA
catctggtggagtttgtcatt

SEQ ID NO: 1024 - DNA, 21 bp, synthetic construct
  source 1..21: mol_type = other DNA
tcattcggatcccaagatgac

SEQ ID NO: 1025 - DNA, 21 bp, synthetic construct
  source 1..21: mol_type = other DNA
ccccagaaaggcgagctgaaa

SEQ ID NO: 1026 - DNA, 21 bp, synthetic construct
  source 1..21: mol_type = other DNA
acctctgcattttcccccaga

SEQ ID NO: 1027 - DNA, 21 bp, synthetic construct
  source 1..21: mol_type = other DNA
agctcgcctttctgggggaaa

SEQ ID NO: 1028 - DNA, 21 bp, synthetic construct
  source 1..21: mol_type = other DNA
tgggggaaaatgcagaggtca

SEQ ID NO: 1029 - DNA, 21 bp, synthetic construct
  source 1..21: mol_type = other DNA
tggagagtccatgtagtcatc

SEQ ID NO: 1030 - DNA, 21 bp, synthetic construct
  source 1..21: mol_type = other DNA
accaccagcagggggattcct

SEQ ID NO: 1031 - DNA, 21 bp, synthetic construct
  source 1..21: mol_type = other DNA
caggaagaccctgaatggagg

SEQ ID NO: 1032 - DNA, 21 bp, synthetic construct
  source 1..21: mol_type = other DNA
ctctctgtcataggtacctgt

SEQ ID NO: 1033 - DNA, 21 bp, synthetic construct
  source 1..21: mol_type = other DNA
gaatgtgtctgtggatcacat

SEQ ID NO: 1034 - DNA, 21 bp, synthetic construct
  source 1..21: mol_type = other DNA
attttagaatgtgtctgtgga

SEQ ID NO: 1035 - DNA, 21 bp, synthetic construct
  source 1..21: mol_type = other DNA
aggtagatccagagtatctaa

SEQ ID NO: 1036 - DNA, 21 bp, synthetic construct
  source 1..21: mol_type = other DNA
acccaactggtcttttcaggt

SEQ ID NO: 1037 - DNA, 21 bp, synthetic construct
  source 1..21: mol_type = other DNA
agtccacattaaatttcaccc

SEQ ID NO: 1038 - DNA, 21 bp, synthetic construct
  source 1..21: mol_type = other DNA
atgtggactcaaatggttact

SEQ ID NO: 1039 - DNA, 21 bp, synthetic construct
  source 1..21: mol_type = other DNA
tctagggtcagtctccctgca

SEQ ID NO: 1040 - DNA, 21 bp, synthetic construct
  source 1..21: mol_type = other DNA
ttttatacttcagtgcaggga

SEQ ID NO: 1041 - DNA, 21 bp, synthetic construct
  source 1..21: mol_type = other DNA
tacttcagtgcagggagactg

SEQ ID NO: 1042 - DNA, 21 bp, synthetic construct
  source 1..21: mol_type = other DNA
atgttggaggtagtaagtcat

SEQ ID NO: 1043 - DNA, 21 bp, synthetic construct
  source 1..21: mol_type = other DNA
agagatatctgaaatattcct

SEQ ID NO: 1044 - DNA, 21 bp, synthetic construct
  source 1..21: mol_type = other DNA
ccacatgatggacagaaggaa

SEQ ID NO: 1045 - DNA, 21 bp, synthetic construct
  source 1..21: mol_type = other DNA
agatatctctgaaaacctcaa

SEQ ID NO: 1046 - DNA, 21 bp, synthetic construct
  source 1..21: mol_type = other DNA
tgcagcgttaccttcttcagt

SEQ ID NO: 1047 - DNA, 21 bp, synthetic construct
  source 1..21: mol_type = other DNA
cctgtcaatcactggcttaaa

SEQ ID NO: 1048 - DNA, 21 bp, synthetic construct
  source 1..21: mol_type = other DNA
agccagtgattgacaggcaaa

SEQ ID NO: 1049 - DNA, 21 bp, synthetic construct
  source 1..21: mol_type = other DNA
tggatgcaaggagcatggttc

SEQ ID NO: 1050 - DNA, 21 bp, synthetic construct
  source 1..21: mol_type = other DNA
cactggattccatccactggg

SEQ ID NO: 1051 - DNA, 21 bp, synthetic construct
  source 1..21: mol_type = other DNA
attttccactggattccatcc

SEQ ID NO: 1052 - DNA, 21 bp, synthetic construct
  source 1..21: mol_type = other DNA
ttcatttttatgcttgatatt

SEQ ID NO: 1053 - DNA, 21 bp, synthetic construct
  source 1..21: mol_type = other DNA
aaacatctgttggtatactgt

SEQ ID NO: 1054 - DNA, 21 bp, synthetic construct
  source 1..21: mol_type = other DNA
tgcttgatattacagtatacc

SEQ ID NO: 1055 - DNA, 21 bp, synthetic construct
  source 1..21: mol_type = other DNA
aagattgtgtattctgtgggt

SEQ ID NO: 1056 - DNA, 21 bp, synthetic construct
  source 1..21: mol_type = other DNA
ttcagcacttgacattgacag

SEQ ID NO: 1057 - DNA, 21 bp, synthetic construct
  source 1..21: mol_type = other DNA
gagcaatatgaactgtcaatg

SEQ ID NO: 1058 - DNA, 21 bp, synthetic construct
  source 1..21: mol_type = other DNA
ttttgttcagcacttgacatt

SEQ ID NO: 1059 - DNA, 21 bp, synthetic construct
  source 1..21: mol_type = other DNA
ctgatgcttgctcgttgacaa

SEQ ID NO: 1060 - DNA, 21 bp, synthetic construct
  source 1..21: mol_type = other DNA
tcaacgagcaagcatcaggaa

SEQ ID NO: 1061 - DNA, 21 bp, synthetic construct
  source 1..21: mol_type = other DNA
gaaacaaattatttttctttc

SEQ ID NO: 1062 - DNA, 21 bp, synthetic construct
  source 1..21: mol_type = other DNA
cttccattcctagttcaatta

SEQ ID NO: 1063 - DNA, 21 bp, synthetic construct
  source 1..21: mol_type = other DNA
tttcttcaggttaattgaact

SEQ ID NO: 1064 - DNA, 21 bp, synthetic construct
  source 1..21: mol_type = other DNA
ttcaggttaattgaactagga

SEQ ID NO: 1065 - DNA, 21 bp, synthetic construct
  source 1..21: mol_type = other DNA
gacgtctggcaatcgcatgaa

SEQ ID NO: 1066 - DNA, 21 bp, synthetic construct
  source 1..21: mol_type = other DNA
tcttacaaaatcccatgctag

SEQ ID NO: 1067 - DNA, 21 bp, synthetic construct
  source 1..21: mol_type = other DNA
agaagatgggtccaattttct

SEQ ID NO: 1068 - DNA, 21 bp, synthetic construct
  source 1..21: mol_type = other DNA
taagagaaaattggacccatc

SEQ ID NO: 1069 - DNA, 21 bp, synthetic construct
  source 1..21: mol_type = other DNA
tatggtgtttctttttatttt

SEQ ID NO: 1070 - DNA, 21 bp, synthetic construct
  source 1..21: mol_type = other DNA
tttttattttcagatttgact

SEQ ID NO: 1071 - DNA, 21 bp, synthetic construct
  source 1..21: mol_type = other DNA
ttttcagatttgacttgggct

SEQ ID NO: 1072 - DNA, 21 bp, synthetic construct
  source 1..21: mol_type = other DNA
agatttgacttgggctcatat

SEQ ID NO: 1073 - DNA, 21 bp, synthetic construct
  source 1..21: mol_type = other DNA
acttgggctcatatgacataa

SEQ ID NO: 1074 - DNA, 21 bp, synthetic construct
  source 1..21: mol_type = other DNA
ttccaaggataagttgcaaga

SEQ ID NO: 1075 - DNA, 21 bp, synthetic construct
  source 1..21: mol_type = other DNA
acctgtaaaatattgaagaaa

SEQ ID NO: 1076 - DNA, 21 bp, synthetic construct
  source 1..21: mol_type = other DNA
ttcaatattttacaggtgaaa

SEQ ID NO: 1077 - DNA, 21 bp, synthetic construct
  source 1..21: mol_type = other DNA
caggtgaaactattttttgaa

SEQ ID NO: 1078 - DNA, 21 bp, synthetic construct
  source 1..21: mol_type = other DNA
aatctcttgaggctcaaggat

SEQ ID NO: 1079 - DNA, 21 bp, synthetic construct
  source 1..21: mol_type = other DNA
aaaaatatccagatgtgatcc

SEQ ID NO: 1080 - DNA, 21 bp, synthetic construct
  source 1..21: mol_type = other DNA
cagaacagtttgaaaaatatc

SEQ ID NO: 1081 - DNA, 21 bp, synthetic construct
  source 1..21: mol_type = other DNA
gttatcgtttccagaacagtt

SEQ ID NO: 1082 - DNA, 21 bp, synthetic construct
  source 1..21: mol_type = other DNA
tatttttggttatcgtttcca

SEQ ID NO: 1083 - DNA, 21 bp, synthetic construct
  source 1..21: mol_type = other DNA
aaactgttctggaaacgataa

SEQ ID NO: 1084 - DNA, 21 bp, synthetic construct
  source 1..21: mol_type = other DNA
agtattaaccattagccaagt

SEQ ID NO: 1085 - DNA, 21 bp, synthetic construct
  source 1..21: mol_type = other DNA
tattgaccatttaagtattaa

SEQ ID NO: 1086 - DNA, 21 bp, synthetic construct
  source 1..21: mol_type = other DNA
ggaggctgagaagggcggatc

SEQ ID NO: 1087 - DNA, 21 bp, synthetic construct
  source 1..21: mol_type = other DNA
gcggagacggggtctcaccgt

SEQ ID NO: 1088 - DNA, 21 bp, synthetic construct
  source 1..21: mol_type = other DNA
tatttttagcggagacggggt

SEQ ID NO: 1089 - DNA, 21 bp, synthetic construct
  source 1..21: mol_type = other DNA
ctgctgcagcctgccgagtag

SEQ ID NO: 1090 - DNA, 21 bp, synthetic construct
  source 1..21: mol_type = other DNA
tgccattttcctgctgcagcc

SEQ ID NO: 1091 - DNA, 21 bp, synthetic construct
  source 1..21: mol_type = other DNA
agacagagtctcgctcagtca

SEQ ID NO: 1092 - DNA, 21 bp, synthetic construct
  source 1..21: mol_type = other DNA
acttcatgcaggcagtcatgt

SEQ ID NO: 1093 - DNA, 21 bp, synthetic construct
  source 1..21: mol_type = other DNA
ttgagacttcttgttggttag

SEQ ID NO: 1094 - DNA, 21 bp, synthetic construct
  source 1..21: mol_type = other DNA
tctaaccaacaagaagtctca

SEQ ID NO: 1095 - DNA, 21 bp, synthetic construct
  source 1..21: mol_type = other DNA
gctggatacgatagctgagag

SEQ ID NO: 1096 - DNA, 21 bp, synthetic construct
  source 1..21: mol_type = other DNA
aataggatactgaactggcct

SEQ ID NO: 1097 - DNA, 21 bp, synthetic construct
  source 1..21: mol_type = other DNA
cttttaaataggatactgaac

SEQ ID NO: 1098 - DNA, 21 bp, synthetic construct
  source 1..21: mol_type = other DNA
aaagtaaacttcctgaataat

SEQ ID NO: 1099 - DNA, 21 bp, synthetic construct
  source 1..21: mol_type = other DNA
gcctcaagtgactttctccat

SEQ ID NO: 1100 - DNA, 21 bp, synthetic construct
  source 1..21: mol_type = other DNA
tccattgcttcacgctatgcc

SEQ ID NO: 1101 - DNA, 21 bp, synthetic construct
  source 1..21: mol_type = other DNA
cttctttaatttttttaacct

SEQ ID NO: 1102 - DNA, 21 bp, synthetic construct
  source 1..21: mol_type = other DNA
atttttttaaccttgcttagt

SEQ ID NO: 1103 - DNA, 21 bp, synthetic construct
  source 1..21: mol_type = other DNA
accttgcttagtattctatag

SEQ ID NO: 1104 - DNA, 21 bp, synthetic construct
  source 1..21: mol_type = other DNA
cttggacgtaaaactggttgg

SEQ ID NO: 1105 - DNA, 21 bp, synthetic construct
  source 1..21: mol_type = other DNA
cccaaccagttttacgtccaa

SEQ ID NO: 1106 - DNA, 21 bp, synthetic construct
  source 1..21: mol_type = other DNA
tgcattggctaattttccttg

SEQ ID NO: 1107 - DNA, 21 bp, synthetic construct
  source 1..21: mol_type = other DNA
tatattttatgcattggctaa

SEQ ID NO: 1108 - DNA, 21 bp, synthetic construct
  source 1..21: mol_type = other DNA
cgtccaaggaaaattagccaa

SEQ ID NO: 1109 - DNA, 21 bp, synthetic construct
  source 1..21: mol_type = other DNA
atagtttgtatattttatgca

SEQ ID NO: 1110 - DNA, 21 bp, synthetic construct
  source 1..21: mol_type = other DNA
ctgatccttgcctttcatagt

SEQ ID NO: 1111 - DNA, 21 bp, synthetic construct
  source 1..21: mol_type = other DNA
gtggcaaagtctctggtttcc

SEQ ID NO: 1112 - DNA, 21 bp, synthetic construct
  source 1..21: mol_type = other DNA
taataatctgagatttggtgg

SEQ ID NO: 1113 - DNA, 21 bp, synthetic construct
  source 1..21: mol_type = other DNA
ccaccaaatctcagattatta

SEQ ID NO: 1114 - DNA, 21 bp, synthetic construct
  source 1..21: mol_type = other DNA
tcaagaaggccaggaaggcct

SEQ ID NO: 1115 - DNA, 21 bp, synthetic construct
  source 1..21: mol_type = other DNA
ggttaagccttacattcatga

SEQ ID NO: 1116 - DNA, 21 bp, synthetic construct
  source 1..21: mol_type = other DNA
gaatgctctcaaaaatctacc

SEQ ID NO: 1117 - DNA, 21 bp, synthetic construct
  source 1..21: mol_type = other DNA
accagagaccattcatttgga

SEQ ID NO: 1118 - DNA, 21 bp, synthetic construct
  source 1..21: mol_type = other DNA
agagcattccaaatgaatggt

SEQ ID NO: 1119 - DNA, 21 bp, synthetic construct
  source 1..21: mol_type = other DNA
accattcattcatttgaccag

SEQ ID NO: 1120 - DNA, 21 bp, synthetic construct
  source 1..21: mol_type = other DNA
ttcatttgaccattcattcat

SEQ ID NO: 1121 - DNA, 21 bp, synthetic construct
  source 1..21: mol_type = other DNA
tatctctgtgagggcagattt

SEQ ID NO: 1122 - DNA, 21 bp, synthetic construct
  source 1..21: mol_type = other DNA
cttttgtatctctgtgagggc

SEQ ID NO: 1123 - DNA, 21 bp, synthetic construct
  source 1..21: mol_type = other DNA
gtttaagccttacattcatga

SEQ ID NO: 1124 - DNA, 21 bp, synthetic construct
  source 1..21: mol_type = other DNA
agccttacattcatgaagtac

SEQ ID NO: 1125 - DNA, 21 bp, synthetic construct
  source 1..21: mol_type = other DNA
gaatgatctcaaaaatctacc

SEQ ID NO: 1126 - DNA, 21 bp, synthetic construct
  source 1..21: mol_type = other DNA
agatcattccaaatgaagtcg

SEQ ID NO: 1127 - DNA, 21 bp, synthetic construct
  source 1..21: mol_type = other DNA
ttgtgtctctgtgagggcaga

SEQ ID NO: 1128 - DNA, 21 bp, synthetic construct
  source 1..21: mol_type = other DNA
ttaaaaatgcaatagtgtatg

SEQ ID NO: 1129 - DNA, 21 bp, synthetic construct
  source 1..21: mol_type = other DNA
aaaagatttattaaaaatgca

SEQ ID NO: 1130 - DNA, 21 bp, synthetic construct
  source 1..21: mol_type = other DNA
ataaatcttttgaaatttgca

SEQ ID NO: 1131 - DNA, 21 bp, synthetic construct
  source 1..21: mol_type = other DNA
accgaaaatacacaatacaat

SEQ ID NO: 1132 - DNA, 21 bp, synthetic construct
  source 1..21: mol_type = other DNA
aaatttgcagaattagattgt

SEQ ID NO: 1133 - DNA, 21 bp, synthetic construct
  source 1..21: mol_type = other DNA
cagaattagattgtattgtgt

SEQ ID NO: 1134 - DNA, 21 bp, synthetic construct
  source 1..21: mol_type = other DNA
cattcaattatcatttaaccg

SEQ ID NO: 1135 - DNA, 21 bp, synthetic construct
  source 1..21: mol_type = other DNA
ggttaaatgataattgaatgt

SEQ ID NO: 1136 - DNA, 21 bp, synthetic construct
  source 1..21: mol_type = other DNA
gatgcagcaccatattttata

SEQ ID NO: 1137 - DNA, 21 bp, synthetic construct
  source 1..21: mol_type = other DNA
cttaaaatatgaagaaatgct

SEQ ID NO: 1138 - DNA, 21 bp, synthetic construct
  source 1..21: mol_type = other DNA
taacccagctttagcatttct

SEQ ID NO: 1139 - DNA, 21 bp, synthetic construct
  source 1..21: mol_type = other DNA
gcatttcttcatattttaagg

SEQ ID NO: 1140 - DNA, 21 bp, synthetic construct
  source 1..21: mol_type = other DNA
ttcatattttaaggaaacccc

SEQ ID NO: 1141 - DNA, 21 bp, synthetic construct
  source 1..21: mol_type = other DNA
aggaaaccccccacctccttc

SEQ ID NO: 1142 - DNA, 21 bp, synthetic construct
  source 1..21: mol_type = other DNA
agagagcaagaagcgccctta

SEQ ID NO: 1143 - DNA, 21 bp, synthetic construct
  source 1..21: mol_type = other DNA
gcagggcatttcagagagcaa

SEQ ID NO: 1144 - DNA, 21 bp, synthetic construct
  source 1..21: mol_type = other DNA
agggcgcttcttgctctctga

SEQ ID NO: 1145 - DNA, 21 bp, synthetic construct
  source 1..21: mol_type = other DNA
ttccaaactaccttattcaaa

SEQ ID NO: 1146 - DNA, 21 bp, synthetic construct
  source 1..21: mol_type = other DNA
tttattccaaactaccttatt

SEQ ID NO: 1147 - DNA, 21 bp, synthetic construct
  source 1..21: mol_type = other DNA
tttctttattccaaactacct

SEQ ID NO: 1148 - DNA, 21 bp, synthetic construct
  source 1..21: mol_type = other DNA
aataaggtagtttggaataaa

SEQ ID NO: 1149 - DNA, 21 bp, synthetic construct
  source 1..21: mol_type = other DNA
ctatctgtatgtagagtgatc

SEQ ID NO: 1150 - DNA, 21 bp, synthetic construct
  source 1..21: mol_type = other DNA
gaataaagaaagaaaagatca

SEQ ID NO: 1151 - DNA, 21 bp, synthetic construct
  source 1..21: mol_type = other DNA
tactgtctcatatataggatc

SEQ ID NO: 1152 - DNA, 21 bp, synthetic construct
  source 1..21: mol_type = other DNA
tgatcctatatatgagacagt

SEQ ID NO: 1153 - DNA, 21 bp, synthetic construct
  source 1..21: mol_type = other DNA
taaaacttatctgtattttta

SEQ ID NO: 1154 - DNA, 21 bp, synthetic construct
  source 1..21: mol_type = other DNA
agtctttctaaaacttatctg

SEQ ID NO: 1155 - DNA, 21 bp, synthetic construct
  source 1..21: mol_type = other DNA
catattgttttgagtctttct

SEQ ID NO: 1156 - DNA, 21 bp, synthetic construct
  source 1..21: mol_type = other DNA
gaaagactcaaaacaatatgt

SEQ ID NO: 1157 - DNA, 21 bp, synthetic construct
  source 1..21: mol_type = other DNA
cattattaaggaagacttggg

SEQ ID NO: 1158 - DNA, 21 bp, synthetic construct
  source 1..21: mol_type = other DNA
ccctcttgacccaacatccca

SEQ ID NO: 1159 - DNA, 21 bp, synthetic construct
  source 1..21: mol_type = other DNA
gagcaatatcatgaaggtcaa

SEQ ID NO: 1160 - DNA, 21 bp, synthetic construct
  source 1..21: mol_type = other DNA
tttgatgccacagtcagagat

SEQ ID NO: 1161 - DNA, 21 bp, synthetic construct
  source 1..21: mol_type = other DNA
atgccacagtcagagatagaa

SEQ ID NO: 1162 - DNA, 21 bp, synthetic construct
  source 1..21: mol_type = other DNA
ggtggccatggatgtgcccca

SEQ ID NO: 1163 - DNA, 21 bp, synthetic construct
  source 1..21: mol_type = other DNA
accaaaaaatgtgtactgtat

SEQ ID NO: 1164 - DNA, 21 bp, synthetic construct
  source 1..21: mol_type = other DNA
gttaaatttgttttcagatca

SEQ ID NO: 1165 - DNA, 21 bp, synthetic construct
  source 1..21: mol_type = other DNA
ttttcagatcatttcatggaa

SEQ ID NO: 1166 - DNA, 21 bp, synthetic construct
  source 1..21: mol_type = other DNA
agatcatttcatggaatcttt

SEQ ID NO: 1167 - DNA, 21 bp, synthetic construct
  source 1..21: mol_type = other DNA
atggaatctttgaagtatctt

SEQ ID NO: 1168 - DNA, 21 bp, synthetic construct
  source 1..21: mol_type = other DNA
aagtatctttgactctaactt

SEQ ID NO: 1169 - DNA, 21 bp, synthetic construct
  source 1..21: mol_type = other DNA
actctaactttgacttggtgg

SEQ ID NO: 1170 - DNA, 21 bp, synthetic construct
  source 1..21: mol_type = other DNA
acttggtggtggaccttcctt

SEQ ID NO: 1171 - DNA, 21 bp, synthetic construct
  source 1..21: mol_type = other DNA
taacacctaagagatatcctt

SEQ ID NO: 1172 - DNA, 21 bp, synthetic construct
  source 1..21: mol_type = other DNA
cttatgctaaaatacatgtaa

SEQ ID NO: 1173 - DNA, 21 bp, synthetic construct
  source 1..21: mol_type = other DNA
aatttccttatgctaaaatac

SEQ ID NO: 1174 - DNA, 21 bp, synthetic construct
  source 1..21: mol_type = other DNA
ctttttcaatttccttatgct

SEQ ID NO: 1175 - DNA, 21 bp, synthetic construct
  source 1..21: mol_type = other DNA
gaattacatgtattttagcat

SEQ ID NO: 1176 - DNA, 21 bp, synthetic construct
  source 1..21: mol_type = other DNA
gcataaggaaattgaaaaagt

SEQ ID NO: 1177 - DNA, 21 bp, synthetic construct
  source 1..21: mol_type = other DNA
catatggtcttgttgaaaaaa

SEQ ID NO: 1178 - DNA, 21 bp, synthetic construct
  source 1..21: mol_type = other DNA
atttacatatggtcttgttga

SEQ ID NO: 1179 - DNA, 21 bp, synthetic construct
  source 1..21: mol_type = other DNA
actatttaatttacatatggt

SEQ ID NO: 1180 - DNA, 21 bp, synthetic construct
  source 1..21: mol_type = other DNA
aacaagaccatatgtaaatta

SEQ ID NO: 1181 - DNA, 21 bp, synthetic construct
  source 1..21: mol_type = other DNA
tggaaacattgttgatggtac

SEQ ID NO: 1182 - DNA, 21 bp, synthetic construct
  source 1..21: mol_type = other DNA
agtagaactgtaccatcaaca

SEQ ID NO: 1183 - DNA, 21 bp, synthetic construct
  source 1..21: mol_type = other DNA
cataaatatgcagagttcttt

SEQ ID NO: 1184 - DNA, 21 bp, synthetic construct
  source 1..21: mol_type = other DNA
acaatattgtaaataacaata

SEQ ID NO: 1185 - DNA, 21 bp, synthetic construct
  source 1..21: mol_type = other DNA
ttttgtattgttatttacaat

SEQ ID NO: 1186 - DNA, 21 bp, synthetic construct
  source 1..21: mol_type = other DNA
tattgttatttacaatattgt

SEQ ID NO: 1187 - DNA, 21 bp, synthetic construct
  source 1..21: mol_type = other DNA
caatattgttaaattgaatgc

SEQ ID NO: 1188 - DNA, 21 bp, synthetic construct
  source 1..21: mol_type = other DNA
gaatcctagaaattgcaaatg

SEQ ID NO: 1189 - DNA, 21 bp, synthetic construct
  source 1..21: mol_type = other DNA
tgtactcaattctttagaatc

SEQ ID NO: 1190 - DNA, 21 bp, synthetic construct
  source 1..21: mol_type = other DNA
caatttctaggattctaaaga

SEQ ID NO: 1191 - DNA, 21 bp, synthetic construct
  source 1..21: mol_type = other DNA
taggattctaaagaattgagt

SEQ ID NO: 1192 - DNA, 21 bp, synthetic construct
  source 1..21: mol_type = other DNA
ttatttgatgataatatgaga

SEQ ID NO: 1193 - DNA, 21 bp, synthetic construct
  source 1..21: mol_type = other DNA
atgataatatgagaattactg

SEQ ID NO: 1194 - DNA, 21 bp, synthetic construct
  source 1..21: mol_type = other DNA
tcaaaacagtattggcacagt

SEQ ID NO: 1195 - DNA, 21 bp, synthetic construct
  source 1..21: mol_type = other DNA
tttatcaaaacagtattggca

SEQ ID NO: 1196 - DNA, 21 bp, synthetic construct
  source 1..21: mol_type = other DNA
aaaatctatttatttatcaaa

SEQ ID NO: 1197 - DNA, 21 bp, synthetic construct
  source 1..21: mol_type = other DNA
tttttaaaaatctatttattt

SEQ ID NO: 1198 - DNA, 21 bp, synthetic construct
  source 1..21: mol_type = other DNA
ataaataaatagatttttaaa

SEQ ID NO: 1199 - DNA, 21 bp, synthetic construct
  source 1..21: mol_type = other DNA
aaaataaatgtattgtactta

SEQ ID NO: 1200 - DNA, 21 bp, synthetic construct
  source 1..21: mol_type = other DNA
tccttaccatgttacttgtca

SEQ ID NO: 1201 - DNA, 21 bp, synthetic construct
  source 1..21: mol_type = other DNA
cctataggatgtctcagtggt

SEQ ID NO: 1202 - DNA, 21 bp, synthetic construct
  source 1..21: mol_type = other DNA
agtcaagctgctgaagttcgt

SEQ ID NO: 1203 - DNA, 21 bp, synthetic construct
  source 1..21: mol_type = other DNA
catgggaaaactgtcatcata

SEQ ID NO: 1204 - DNA, 21 bp, synthetic construct
  source 1..21: mol_type = other DNA
tgatgacagttttcccatgga

SEQ ID NO: 1205 - DNA, 21 bp, synthetic construct
  source 1..21: mol_type = other DNA
taaccactgtgccaggtactg

SEQ ID NO: 1206 - DNA, 21 bp, synthetic construct
  source 1..21: mol_type = other DNA
ccatggaaatcagacagtacc

SEQ ID NO: 1207 - DNA, 21 bp, synthetic construct
  source 1..21: mol_type = other DNA
atttgccaccatccgttttca

SEQ ID NO: 1208 - DNA, 21 bp, synthetic construct
  source 1..21: mol_type = other DNA
ccaccatccgttttcatgacc

SEQ ID NO: 1209 - DNA, 21 bp, synthetic construct
  source 1..21: mol_type = other DNA
atgacctcctgtcacagctgg

SEQ ID NO: 1210 - DNA, 21 bp, synthetic construct
  source 1..21: mol_type = other DNA
cttatgttatgctgtagcaag

SEQ ID NO: 1211 - DNA, 21 bp, synthetic construct
  source 1..21: mol_type = other DNA
tttggagaataacttcttgct

SEQ ID NO: 1212 - DNA, 21 bp, synthetic construct
  source 1..21: mol_type = other DNA
gagaataacttcttgctacag

SEQ ID NO: 1213 - DNA, 21 bp, synthetic construct
  source 1..21: mol_type = other DNA
ttctaaccactcaaatctagg

SEQ ID NO: 1214 - DNA, 21 bp, synthetic construct
  source 1..21: mol_type = other DNA
aggaagacccaatccagatgt

SEQ ID NO: 1215 - DNA, 21 bp, synthetic construct
  source 1..21: mol_type = other DNA
ttccttcagacagctgtaaat

SEQ ID NO: 1216 - DNA, 21 bp, synthetic construct
  source 1..21: mol_type = other DNA
ctttcttccttcagacagctg

SEQ ID NO: 1217 - DNA, 21 bp, synthetic construct
  source 1..21: mol_type = other DNA
cagaattttcctttcttcctt

SEQ ID NO: 1218 - DNA, 21 bp, synthetic construct
  source 1..21: mol_type = other DNA
cagctgtctgaaggaagaaag

SEQ ID NO: 1219 - DNA, 21 bp, synthetic construct
  source 1..21: mol_type = other DNA
tctaacatcactgtgctctga

SEQ ID NO: 1220 - DNA, 21 bp, synthetic construct
  source 1..21: mol_type = other DNA
tgtttgtctaacatcactgtg

SEQ ID NO: 1221 - DNA, 21 bp, synthetic construct
  source 1..21: mol_type = other DNA
ctgtcaagctctttctgtttg

SEQ ID NO: 1222 - DNA, 21 bp, synthetic construct
  source 1..21: mol_type = other DNA
tgactttactgtcaagctctt

SEQ ID NO: 1223 - DNA, 21 bp, synthetic construct
  source 1..21: mol_type = other DNA
atgctctatacactacaaaca

SEQ ID NO: 1224 - DNA, 21 bp, synthetic construct
  source 1..21: mol_type = other DNA
catctttgtttgtagtgtata

SEQ ID NO: 1225 - DNA, 21 bp, synthetic construct
  source 1..21: mol_type = other DNA
tttgtagtgtatagagcatga

SEQ ID NO: 1226 - DNA, 21 bp, synthetic construct
  source 1..21: mol_type = other DNA
tagtgtatagagcatgaaatc

SEQ ID NO: 1227 - DNA, 21 bp, synthetic construct
  source 1..21: mol_type = other DNA
aagtcatattcatcttgtaaa

SEQ ID NO: 1228 - DNA, 21 bp, synthetic construct
  source 1..21: mol_type = other DNA
catttgaagtcatattcatct

SEQ ID NO: 1229 - DNA, 21 bp, synthetic construct
  source 1..21: mol_type = other DNA
caagatgaatatgacttcaaa

SEQ ID NO: 1230 - DNA, 21 bp, synthetic construct
  source 1..21: mol_type = other DNA
ctggctgtctctcaatttata

SEQ ID NO: 1231 - DNA, 21 bp, synthetic construct
  source 1..21: mol_type = other DNA
ccacaccattggtctcgtgtt

SEQ ID NO: 1232 - DNA, 21 bp, synthetic construct
  source 1..21: mol_type = other DNA
tgatcactctttgccacacca

SEQ ID NO: 1233 - DNA, 21 bp, synthetic construct
  source 1..21: mol_type = other DNA
tagaacacgagaccaatggtg

SEQ ID NO: 1234 - DNA, 21 bp, synthetic construct
  source 1..21: mol_type = other DNA
tcttattgtcaagcattaaat

SEQ ID NO: 1235 - DNA, 21 bp, synthetic construct
  source 1..21: mol_type = other DNA
atgcttgacaataagagaaag

SEQ ID NO: 1236 - DNA, 21 bp, synthetic construct
  source 1..21: mol_type = other DNA
tgaactacttcctaaaggcaa

SEQ ID NO: 1237 - DNA, 21 bp, synthetic construct
  source 1..21: mol_type = other DNA
actttgtttcttctattgcct

SEQ ID NO: 1238 - DNA, 21 bp, synthetic construct
  source 1..21: mol_type = other DNA
tttcttctattgcctttagga

SEQ ID NO: 1239 - DNA, 21 bp, synthetic construct
  source 1..21: mol_type = other DNA
ttctattgcctttaggaagta

SEQ ID NO: 1240 - DNA, 21 bp, synthetic construct
  source 1..21: mol_type = other DNA
ggaagtagttcacaaaataat

SEQ ID NO: 1241 - DNA, 21 bp, synthetic construct
  source 1..21: mol_type = other DNA
agctgctgccgaacttgctgc

SEQ ID NO: 1242 - DNA, 21 bp, synthetic construct
  source 1..21: mol_type = other DNA
tgttccaattcctccaacttt

SEQ ID NO: 1243 - DNA, 21 bp, synthetic construct
  source 1..21: mol_type = other DNA
tgatagggtcatgttcgtagg

SEQ ID NO: 1244 - DNA, 21 bp, synthetic construct
  source 1..21: mol_type = other DNA
ttttttgtgatagggtcatgt

SEQ ID NO: 1245 - DNA, 21 bp, synthetic construct
  source 1..21: mol_type = other DNA
caccacaaacgagctgcaaat

SEQ ID NO: 1246 - DNA, 21 bp, synthetic construct
  source 1..21: mol_type = other DNA
ctgggtatttgcagctcgttt

SEQ ID NO: 1247 - DNA, 21 bp, synthetic construct
  source 1..21: mol_type = other DNA
cagctcgtttgtggtggaaag

SEQ ID NO: 1248 - DNA, 21 bp, synthetic construct
  source 1..21: mol_type = other DNA
tggtggaaagacagccctgca

SEQ ID NO: 1249 - DNA, 21 bp, synthetic construct
  source 1..21: mol_type = other DNA
accaacagtctggaaagaaaa

SEQ ID NO: 1250 - DNA, 21 bp, synthetic construct
  source 1..21: mol_type = other DNA
tttttctttccagactgttgg

SEQ ID NO: 1251 - DNA, 21 bp, synthetic construct
  source 1..21: mol_type = other DNA
tttccagactgttggtgaaat

SEQ ID NO: 1252 - DNA, 21 bp, synthetic construct
  source 1..21: mol_type = other DNA
cagactgttggtgaaattgca

SEQ ID NO: 1253 - DNA, 21 bp, synthetic construct
  source 1..21: mol_type = other DNA
aaattataattcagctcttgc

SEQ ID NO: 1254 - DNA, 21 bp, synthetic construct
  source 1..21: mol_type = other DNA
actttcaaattataattcagc

SEQ ID NO: 1255 - DNA, 21 bp, synthetic construct
  source 1..21: mol_type = other DNA
aaagtcaaagtcttatttgat

SEQ ID NO: 1256 - DNA, 21 bp, synthetic construct
  source 1..21: mol_type = other DNA
tctcattcacatctctgcaaa

SEQ ID NO: 1257 - DNA, 21 bp, synthetic construct
  source 1..21: mol_type = other DNA
ctgtatttctctcattcacat

SEQ ID NO: 1258 - DNA, 21 bp, synthetic construct
  source 1..21: mol_type = other DNA
cagagatgtgaatgagagaaa

SEQ ID NO: 1259 - DNA, 21 bp, synthetic construct
  source 1..21: mol_type = other DNA
agcatttctttcctatattgt

SEQ ID NO: 1260 - DNA, 21 bp, synthetic construct
  source 1..21: mol_type = other DNA
tttcctatattgtatagattt

SEQ ID NO: 1261 - DNA, 21 bp, synthetic construct
  source 1..21: mol_type = other DNA
ctatattgtatagatttagga

SEQ ID NO: 1262 - DNA, 21 bp, synthetic construct
  source 1..21: mol_type = other DNA
tgtgcgtgcccaaaatgttga

SEQ ID NO: 1263 - DNA, 21 bp, synthetic construct
  source 1..21: mol_type = other DNA
ggaagttcaacattttgggca

SEQ ID NO: 1264 - DNA, 21 bp, synthetic construct
  source 1..21: mol_type = other DNA
ggcacgcacacaaaagtgatg

SEQ ID NO: 1265 - DNA, 21 bp, synthetic construct
  source 1..21: mol_type = other DNA
aattgctataaaacaaataat

SEQ ID NO: 1266 - DNA, 21 bp, synthetic construct
  source 1..21: mol_type = other DNA
ctaagatgattatttgtttta

SEQ ID NO: 1267 - DNA, 21 bp, synthetic construct
  source 1..21: mol_type = other DNA
tgttctttcaattgctataaa

SEQ ID NO: 1268 - DNA, 21 bp, synthetic construct
  source 1..21: mol_type = other DNA
ttttatagcaattgaaagaac

SEQ ID NO: 1269 - DNA, 21 bp, synthetic construct
  source 1..21: mol_type = other DNA
tagcaattgaaagaacagaaa

SEQ ID NO: 1270 - DNA, 21 bp, synthetic construct
  source 1..21: mol_type = other DNA
ttctttccttttctcttccaa

SEQ ID NO: 1271 - DNA, 21 bp, synthetic construct
  source 1..21: mol_type = other DNA
cttttctcttccaagggtcct

SEQ ID NO: 1272 - DNA, 21 bp, synthetic construct
  source 1..21: mol_type = other DNA
tcttccaagggtcctctcatc

SEQ ID NO: 1273 - DNA, 21 bp, synthetic construct
  source 1..21: mol_type = other DNA
aaaactaagggagtgaagctc

SEQ ID NO: 1274 - DNA, 21 bp, synthetic construct
  source 1..21: mol_type = other DNA
aaacccaattgtgccagcctg

SEQ ID NO: 1275 - DNA, 21 bp, synthetic construct
  source 1..21: mol_type = other DNA
aaggtctttgtcatcctttag

SEQ ID NO: 1276 - DNA, 21 bp, synthetic construct
  source 1..21: mol_type = other DNA
tcatcctttagacgacctctc

SEQ ID NO: 1277 - DNA, 21 bp, synthetic construct
  source 1..21: mol_type = other DNA
gacgacctctctgcccgttgt

SEQ ID NO: 1278 - DNA, 21 bp, synthetic construct
  source 1..21: mol_type = other DNA
gtacaacatgctggtggcgga

SEQ ID NO: 1279 - DNA, 21 bp, synthetic construct
  source 1..21: mol_type = other DNA
ggtgttttctctctagaatct

SEQ ID NO: 1280 - DNA, 21 bp, synthetic construct
  source 1..21: mol_type = other DNA
tctctagaatctgtccttctt

SEQ ID NO: 1281 - DNA, 21 bp, synthetic construct
  source 1..21: mol_type = other DNA
gtgacagaagaaaactgccaa

SEQ ID NO: 1282 - DNA, 21 bp, synthetic construct
  source 1..21: mol_type = other DNA
agaagtgctgagttggcagtt

SEQ ID NO: 1283 - DNA, 21 bp, synthetic construct
  source 1..21: mol_type = other DNA
ttctgtcaccaaaagaggtct

SEQ ID NO: 1284 - DNA, 21 bp, synthetic construct
  source 1..21: mol_type = other DNA
tttgtttaggtcctaacgcca

SEQ ID NO: 1285 - DNA, 21 bp, synthetic construct
  source 1..21: mol_type = other DNA
tttaggtcctaacgccagccc

SEQ ID NO: 1286 - DNA, 21 bp, synthetic construct
  source 1..21: mol_type = other DNA
ggtcctaacgccagccccgat

SEQ ID NO: 1287 - DNA, 21 bp, synthetic construct
  source 1..21: mol_type = other DNA
ctgaaagtatacaaatgcaga

SEQ ID NO: 1288 - DNA, 21 bp, synthetic construct
  source 1..21: mol_type = other DNA
tattttcctgaaagtatacaa

SEQ ID NO: 1289 - DNA, 21 bp, synthetic construct
  source 1..21: mol_type = other DNA
tcatttatattttcctgaaag

SEQ ID NO: 1290 - DNA, 21 bp, synthetic construct
  source 1..21: mol_type = other DNA
tatactttcaggaaaatataa

SEQ ID NO: 1291 - DNA, 21 bp, synthetic construct
  source 1..21: mol_type = other DNA
aggaaaatataaatgataaaa

SEQ ID NO: 1292 - DNA, 21 bp, synthetic construct
  source 1..21: mol_type = other DNA
aatccaaagccagaagggaaa

SEQ ID NO: 1293 - DNA, 21 bp, synthetic construct
  source 1..21: mol_type = other DNA
atgagttctaggatgctttca

SEQ ID NO: 1294 - DNA, 21 bp, synthetic construct
  source 1..21: mol_type = other DNA
ccttctggctttggattgaaa

SEQ ID NO: 1295 - DNA, 21 bp, synthetic construct
  source 1..21: mol_type = other DNA
gattgaaagcatcctagaact

SEQ ID NO: 1296 - DNA, 21 bp, synthetic construct
  source 1..21: mol_type = other DNA
cttagcttttctcctttttag

SEQ ID NO: 1297 - DNA, 21 bp, synthetic construct
  source 1..21: mol_type = other DNA
tcctttttagaacctgacttc

SEQ ID NO: 1298 - DNA, 21 bp, synthetic construct
  source 1..21: mol_type = other DNA
ttcgtgtagggttcaaccgca

SEQ ID NO: 1299 - DNA, 21 bp, synthetic construct
  source 1..21: mol_type = other DNA
gaacctgacttccatgcggtt

SEQ ID NO: 1300 - DNA, 21 bp, synthetic construct
  source 1..21: mol_type = other DNA
taattgcgaatgatgtcaggg

SEQ ID NO: 1301 - DNA, 21 bp, synthetic construct
  source 1..21: mol_type = other DNA
tgctgttactttccctgacat

SEQ ID NO: 1302 - DNA, 21 bp, synthetic construct
  source 1..21: mol_type = other DNA
cctgacatcattcgcaattac

SEQ ID NO: 1303 - DNA, 21 bp, synthetic construct
  source 1..21: mol_type = other DNA
gatacagatacttcaggggat

SEQ ID NO: 1304 - DNA, 21 bp, synthetic construct
  source 1..21: mol_type = other DNA
tcaatatttggatacagatac

SEQ ID NO: 1305 - DNA, 21 bp, synthetic construct
  source 1..21: mol_type = other DNA
caaaggcatggtctttgtcaa

SEQ ID NO: 1306 - DNA, 21 bp, synthetic construct
  source 1..21: mol_type = other DNA
gcctggagtaatactttccaa

SEQ ID NO: 1307 - DNA, 21 bp, synthetic construct
  source 1..21: mol_type = other DNA
gaaagtattactccaggccaa

SEQ ID NO: 1308 - DNA, 21 bp, synthetic construct
  source 1..21: mol_type = other DNA
gggccatcaagttccattggc

SEQ ID NO: 1309 - DNA, 21 bp, synthetic construct
  source 1..21: mol_type = other DNA
tttctagcaccagagccaatg

SEQ ID NO: 1310 - DNA, 21 bp, synthetic construct
  source 1..21: mol_type = other DNA
tagcaccagagccaatggaac

SEQ ID NO: 1311 - DNA, 21 bp, synthetic construct
  source 1..21: mol_type = other DNA
tttttccccattttagtcacc

SEQ ID NO: 1312 - DNA, 21 bp, synthetic construct
  source 1..21: mol_type = other DNA
cccattttagtcacccttcta

SEQ ID NO: 1313 - DNA, 21 bp, synthetic construct
  source 1..21: mol_type = other DNA
gtcacccttctagacttcaga

SEQ ID NO: 1314 - DNA, 21 bp, synthetic construct
  source 1..21: mol_type = other DNA
acgaggtgtctcggatagtgg

SEQ ID NO: 1315 - DNA, 21 bp, synthetic construct
  source 1..21: mol_type = other DNA
tctttttacagatgaacacag

SEQ ID NO: 1316 - DNA, 21 bp, synthetic construct
  source 1..21: mol_type = other DNA
acatcttcacttgctgtggaa

SEQ ID NO: 1317 - DNA, 21 bp, synthetic construct
  source 1..21: mol_type = other DNA
ctttctttatctttttccaca

SEQ ID NO: 1318 - DNA, 21 bp, synthetic construct
  source 1..21: mol_type = other DNA
tttatctttttccacagcaag

SEQ ID NO: 1319 - DNA, 21 bp, synthetic construct
  source 1..21: mol_type = other DNA
tctttttccacagcaagtgaa

SEQ ID NO: 1320 - DNA, 21 bp, synthetic construct
  source 1..21: mol_type = other DNA
cacagcaagtgaagatgttaa

SEQ ID NO: 1321 - DNA, 21 bp, synthetic construct
  source 1..21: mol_type = other DNA
tggctctggcaaagatctctt

SEQ ID NO: 1322 - DNA, 21 bp, synthetic construct
  source 1..21: mol_type = other DNA
catttctggctctggcaaaga

SEQ ID NO: 1323 - DNA, 21 bp, synthetic construct
  source 1..21: mol_type = other DNA
agaagtctgtactttccattt

SEQ ID NO: 1324 - DNA, 21 bp, synthetic construct
  source 1..21: mol_type = other DNA
ccagagccagaaatggaaagt

SEQ ID NO: 1325 - DNA, 21 bp, synthetic construct
  source 1..21: mol_type = other DNA
aatagatattttcagaagtct

SEQ ID NO: 1326 - DNA, 21 bp, synthetic construct
  source 1..21: mol_type = other DNA
taaaaataatttttcatagag

SEQ ID NO: 1327 - DNA, 21 bp, synthetic construct
  source 1..21: mol_type = other DNA
atagagcaacttgtgattgga

SEQ ID NO: 1328 - DNA, 21 bp, synthetic construct
  source 1..21: mol_type = other DNA
tcctccaacaggggtaaaaca

SEQ ID NO: 1329 - DNA, 21 bp, synthetic construct
  source 1..21: mol_type = other DNA
ttttacccctgttggaggaca

SEQ ID NO: 1330 - DNA, 21 bp, synthetic construct
  source 1..21: mol_type = other DNA
cccctgttggaggacaaacaa

SEQ ID NO: 1331 - DNA, 21 bp, synthetic construct
  source 1..21: mol_type = other DNA
acgaacctattcagttgtgaa

SEQ ID NO: 1332 - DNA, 21 bp, synthetic construct
  source 1..21: mol_type = other DNA
acaactgaataggttcgtcaa

SEQ ID NO: 1333 - DNA, 21 bp, synthetic construct
  source 1..21: mol_type = other DNA
atgtggccacctccaaattcc

SEQ ID NO: 1334 - DNA, 21 bp, synthetic construct
  source 1..21: mol_type = other DNA
ctgttccaaatacttcatctt

SEQ ID NO: 1335 - DNA, 21 bp, synthetic construct
  source 1..21: mol_type = other DNA
gaggtggccacattaaagatg

SEQ ID NO: 1336 - DNA, 21 bp, synthetic construct
  source 1..21: mol_type = other DNA
tatccatgtaatgatacatct

SEQ ID NO: 1337 - DNA, 21 bp, synthetic construct
  source 1..21: mol_type = other DNA
atctgtcgtagttcttcctca

SEQ ID NO: 1338 - DNA, 21 bp, synthetic construct
  source 1..21: mol_type = other DNA
atgcttagtgtccacacccac

SEQ ID NO: 1339 - DNA, 21 bp, synthetic construct
  source 1..21: mol_type = other DNA
caaagcctgaaaggcttctcg

SEQ ID NO: 1340 - DNA, 21 bp, synthetic construct
  source 1..21: mol_type = other DNA
ccatttctcgagaagcctttc

SEQ ID NO: 1341 - DNA, 21 bp, synthetic construct
  source 1..21: mol_type = other DNA
tcgagaagcctttcaggcttt

SEQ ID NO: 1342 - DNA, 21 bp, synthetic construct
  source 1..21: mol_type = other DNA
aggctttggaaaaattgaata

SEQ ID NO: 1343 - DNA, 21 bp, synthetic construct
  source 1..21: mol_type = other DNA
gaaaaattgaataatagacag

SEQ ID NO: 1344 - DNA, 21 bp, synthetic construct
  source 1..21: mol_type = other DNA
ctgccaataagaaacaaaata

SEQ ID NO: 1345 - DNA, 21 bp, synthetic construct
  source 1..21: mol_type = other DNA
tatctatttcctgccaataag

SEQ ID NO: 1346 - DNA, 21 bp, synthetic construct
  source 1..21: mol_type = other DNA
attttttatatctatttcctg

SEQ ID NO: 1347 - DNA, 21 bp, synthetic construct
  source 1..21: mol_type = other DNA
tttcttattggcaggaaatag

SEQ ID NO: 1348 - DNA, 21 bp, synthetic construct
  source 1..21: mol_type = other DNA
ttattggcaggaaatagatat

SEQ ID NO: 1349 - DNA, 21 bp, synthetic construct
  source 1..21: mol_type = other DNA
ttgtgttggccaaaattataa

SEQ ID NO: 1350 - DNA, 21 bp, synthetic construct
  source 1..21: mol_type = other DNA
agttctgtatttgttgtgttg

SEQ ID NO: 1351 - DNA, 21 bp, synthetic construct
  source 1..21: mol_type = other DNA
gcaaatctttcagttctgtat

SEQ ID NO: 1352 - DNA, 21 bp, synthetic construct
  source 1..21: mol_type = other DNA
gccaacacaacaaatacagaa

SEQ ID NO: 1353 - DNA, 21 bp, synthetic construct
  source 1..21: mol_type = other DNA
ccaaagaggattcccaaggat

SEQ ID NO: 1354 - DNA, 21 bp, synthetic construct
  source 1..21: mol_type = other DNA
tacagaaagaaatggtaacga

SEQ ID NO: 1355 - DNA, 21 bp, synthetic construct
  source 1..21: mol_type = other DNA
tttctgtataaacattcccat

SEQ ID NO: 1356 - DNA, 21 bp, synthetic construct
  source 1..21: mol_type = other DNA
tgtataaacattcccatgaag

SEQ ID NO: 1357 - DNA, 21 bp, synthetic construct
  source 1..21: mol_type = other DNA
ttattatttgaacttacagtt

SEQ ID NO: 1358 - DNA, 21 bp, synthetic construct
  source 1..21: mol_type = other DNA
aacttacagtttttatttatt

SEQ ID NO: 1359 - DNA, 21 bp, synthetic construct
  source 1..21: mol_type = other DNA
tttattcaatgcctggataca

SEQ ID NO: 1360 - DNA, 21 bp, synthetic construct
  source 1..21: mol_type = other DNA
ttcaatgcctggatacacatg

SEQ ID NO: 1361 - DNA, 21 bp, synthetic construct
  source 1..21: mol_type = other DNA
tagcagacggctcttgcagct

SEQ ID NO: 1362 - DNA, 21 bp, synthetic construct
  source 1..21: mol_type = other DNA
tacaatttctagcagacggct

SEQ ID NO: 1363 - DNA, 21 bp, synthetic construct
  source 1..21: mol_type = other DNA
tagttgtctttctacaatttc

SEQ ID NO: 1364 - DNA, 21 bp, synthetic construct
  source 1..21: mol_type = other DNA
taattacatccatttgtagtt

SEQ ID NO: 1365 - DNA, 21 bp, synthetic construct
  source 1..21: mol_type = other DNA
tcttttacagatcgagataga

SEQ ID NO: 1366 - DNA, 21 bp, synthetic construct
  source 1..21: mol_type = other DNA
cagatcgagatagacaatggg

SEQ ID NO: 1367 - DNA, 21 bp, synthetic construct
  source 1..21: mol_type = other DNA
cttgtgtgcatgctgcttggg

SEQ ID NO: 1368 - DNA, 21 bp, synthetic construct
  source 1..21: mol_type = other DNA
tgaagaagtacatcccaagca

SEQ ID NO: 1369 - DNA, 21 bp, synthetic construct
  source 1..21: mol_type = other DNA
caaaactttgcttgtgtgcat

SEQ ID NO: 1370 - DNA, 21 bp, synthetic construct
  source 1..21: mol_type = other DNA
gttttgcaaaactttgcttgt

SEQ ID NO: 1371 - DNA, 21 bp, synthetic construct
  source 1..21: mol_type = other DNA
ctgcaggaccttttggttttg

SEQ ID NO: 1372 - DNA, 21 bp, synthetic construct
  source 1..21: mol_type = other DNA
caaaaccaaaaggtcctgcag

SEQ ID NO: 1373 - DNA, 21 bp, synthetic construct
  source 1..21: mol_type = other DNA
cgctgggcccctaattagtct

SEQ ID NO: 1374 - DNA, 21 bp, synthetic construct
  source 1..21: mol_type = other DNA
atcagtagtagcttcagtttc

SEQ ID NO: 1375 - DNA, 21 bp, synthetic construct
  source 1..21: mol_type = other DNA
atgtgatgactttaatcagta

SEQ ID NO: 1376 - DNA, 21 bp, synthetic construct
  source 1..21: mol_type = other DNA
aaaaactagtattacaatgtt

SEQ ID NO: 1377 - DNA, 21 bp, synthetic construct
  source 1..21: mol_type = other DNA
agttctcctgtactaaaagct

SEQ ID NO: 1378 - DNA, 21 bp, synthetic construct
  source 1..21: mol_type = other DNA
aaagtccagcttttagtacag

SEQ ID NO: 1379 - DNA, 21 bp, synthetic construct
  source 1..21: mol_type = other DNA
tatcaacatggaatgatttca

SEQ ID NO: 1380 - DNA, 21 bp, synthetic construct
  source 1..21: mol_type = other DNA
gtacaggagaactgaaatcat

SEQ ID NO: 1381 - DNA, 21 bp, synthetic construct
  source 1..21: mol_type = other DNA
cctactttatatcaacatgga

SEQ ID NO: 1382 - DNA, 21 bp, synthetic construct
  source 1..21: mol_type = other DNA
caaaaagtacaatttttttcc

SEQ ID NO: 1383 - DNA, 21 bp, synthetic construct
  source 1..21: mol_type = other DNA
aaaacacacagaagtgaaaag

SEQ ID NO: 1384 - DNA, 21 bp, synthetic construct
  source 1..21: mol_type = other DNA
gaaaatagcacttttcacttc

SEQ ID NO: 1385 - DNA, 21 bp, synthetic construct
  source 1..21: mol_type = other DNA
acttctgtgtgtttttaaaat

SEQ ID NO: 1386 - DNA, 21 bp, synthetic construct
  source 1..21: mol_type = other DNA
aaattaatgttatagaagact

SEQ ID NO: 1387 - DNA, 21 bp, synthetic construct
  source 1..21: mol_type = other DNA
actcaaaaatagaaatcatga

SEQ ID NO: 1388 - DNA, 21 bp, synthetic construct
  source 1..21: mol_type = other DNA
tagctttaactcaaaaataga

SEQ ID NO: 1389 - DNA, 21 bp, synthetic construct
  source 1..21: mol_type = other DNA
tatttttgagttaaagctaga

SEQ ID NO: 1390 - DNA, 21 bp, synthetic construct
  source 1..21: mol_type = other DNA
agttaaagctagaaaagggtt

SEQ ID NO: 1391 - DNA, 21 bp, synthetic construct
  source 1..21: mol_type = other DNA
attttgtcacactgttttcat

SEQ ID NO: 1392 - DNA, 21 bp, synthetic construct
  source 1..21: mol_type = other DNA
aagtgtggaatcaacgctatg

SEQ ID NO: 1393 - DNA, 21 bp, synthetic construct
  source 1..21: mol_type = other DNA
tcacactgttttcatagcgtt

SEQ ID NO: 1394 - DNA, 21 bp, synthetic construct
  source 1..21: mol_type = other DNA
agaagtatttgaagtgtggaa

SEQ ID NO: 1395 - DNA, 21 bp, synthetic construct
  source 1..21: mol_type = other DNA
atagcgttgattccacacttc

SEQ ID NO: 1396 - DNA, 21 bp, synthetic construct
  source 1..21: mol_type = other DNA
tagaactggcccaactgtata

SEQ ID NO: 1397 - DNA, 21 bp, synthetic construct
  source 1..21: mol_type = other DNA
agacatcagactttctagaac

SEQ ID NO: 1398 - DNA, 21 bp, synthetic construct
  source 1..21: mol_type = other DNA
tacagttgggccagttctaga

SEQ ID NO: 1399 - DNA, 21 bp, synthetic construct
  source 1..21: mol_type = other DNA
ccctttgagacatcagacttt

SEQ ID NO: 1400 - DNA, 21 bp, synthetic construct
  source 1..21: mol_type = other DNA
tgtcccacaagaaagtagtaa

SEQ ID NO: 1401 - DNA, 21 bp, synthetic construct
  source 1..21: mol_type = other DNA
aggtctttctgtcccacaaga

SEQ ID NO: 1402 - DNA, 21 bp, synthetic construct
  source 1..21: mol_type = other DNA
ttgtgggacagaaagacctta

SEQ ID NO: 1403 - DNA, 21 bp, synthetic construct
  source 1..21: mol_type = other DNA
cagcttagaaaatactctagc

SEQ ID NO: 1404 - DNA, 21 bp, synthetic construct
  source 1..21: mol_type = other DNA
caaggcacactaagtttccag

SEQ ID NO: 1405 - DNA, 21 bp, synthetic construct
  source 1..21: mol_type = other DNA
taagctggaaacttagtgtgc

SEQ ID NO: 1406 - DNA, 21 bp, synthetic construct
  source 1..21: mol_type = other DNA
taaaagttgcagacatgatcc

SEQ ID NO: 1407 - DNA, 21 bp, synthetic construct
  source 1..21: mol_type = other DNA
gaaatagtgctttatattgca

SEQ ID NO: 1408 - DNA, 21 bp, synthetic construct
  source 1..21: mol_type = other DNA
tattgcagcagtcttttatat

SEQ ID NO: 1409 - DNA, 21 bp, synthetic construct
  source 1..21: mol_type = other DNA
atgctattaaaaaaaagtcaa

SEQ ID NO: 1410 - DNA, 21 bp, synthetic construct
  source 1..21: mol_type = other DNA
tatttgacttttttttaatag

SEQ ID NO: 1411 - DNA, 21 bp, synthetic construct
  source 1..21: mol_type = other DNA
acttttttttaatagcattaa

SEQ ID NO: 1412 - DNA, 21 bp, synthetic construct
  source 1..21: mol_type = other DNA
agagtgagctgatctgcaatt

SEQ ID NO: 1413 - DNA, 21 bp, synthetic construct
  source 1..21: mol_type = other DNA
atagcattaaaattgcagatc

SEQ ID NO: 1414 - DNA, 21 bp, synthetic construct
  source 1..21: mol_type = other DNA
agggtaccagatattttctat

SEQ ID NO: 1415 - DNA, 21 bp, synthetic construct
  source 1..21: mol_type = other DNA
aatgtcatcagaaatcctgca

SEQ ID NO: 1416 - DNA, 21 bp, synthetic construct
  source 1..21: mol_type = other DNA
aaataggtgggctacctttct

SEQ ID NO: 1417 - DNA, 21 bp, synthetic construct
  source 1..21: mol_type = other DNA
aggggcagaaacaccatcttc

SEQ ID NO: 1418 - DNA, 21 bp, synthetic construct
  source 1..21: mol_type = other DNA
tgcccctcaaatggtcccttg

SEQ ID NO: 1419 - DNA, 21 bp, synthetic construct
  source 1..21: mol_type = other DNA
tactttcctcactgttggctc

SEQ ID NO: 1420 - DNA, 21 bp, synthetic construct
  source 1..21: mol_type = other DNA
ctcactgttggctctcttaac

SEQ ID NO: 1421 - DNA, 21 bp, synthetic construct
  source 1..21: mol_type = other DNA
gagatgcttcagtgctctgac

SEQ ID NO: 1422 - DNA, 21 bp, synthetic construct
  source 1..21: mol_type = other DNA
ttccaaggaaatggtgtccca

SEQ ID NO: 1423 - DNA, 21 bp, synthetic construct
  source 1..21: mol_type = other DNA
cttggaataaaatacgacttc

SEQ ID NO: 1424 - DNA, 21 bp, synthetic construct
  source 1..21: mol_type = other DNA
catggatcaagagatcataat

SEQ ID NO: 1425 - DNA, 21 bp, synthetic construct
  source 1..21: mol_type = other DNA
gtggttccccagaaggtcagc

SEQ ID NO: 1426 - DNA, 21 bp, synthetic construct
  source 1..21: mol_type = other DNA
tactttcgtggttccccagaa

SEQ ID NO: 1427 - DNA, 21 bp, synthetic construct
  source 1..21: mol_type = other DNA
ctcctgacgggggtgttccag

SEQ ID NO: 1428 - DNA, 21 bp, synthetic construct
  source 1..21: mol_type = other DNA
taaaatccgtggaaagtctcc

SEQ ID NO: 1429 - DNA, 21 bp, synthetic construct
  source 1..21: mol_type = other DNA
ggagactttccacggatttta

SEQ ID NO: 1430 - DNA, 21 bp, synthetic construct
  source 1..21: mol_type = other DNA
cacggattttacaaaagcacc

SEQ ID NO: 1431 - DNA, 21 bp, synthetic construct
  source 1..21: mol_type = other DNA
caaaagcacctacagaaccaa

SEQ ID NO: 1432 - DNA, 21 bp, synthetic construct
  source 1..21: mol_type = other DNA
tttcacttgccttaattttag

SEQ ID NO: 1433 - DNA, 21 bp, synthetic construct
  source 1..21: mol_type = other DNA
acttgccttaattttaggata

SEQ ID NO: 1434 - DNA, 21 bp, synthetic construct
  source 1..21: mol_type = other DNA
ggatactagcatcaacacaat

SEQ ID NO: 1435 - DNA, 21 bp, synthetic construct
  source 1..21: mol_type = other DNA
aacccactgcagctagaatgg

SEQ ID NO: 1436 - DNA, 21 bp, synthetic construct
  source 1..21: mol_type = other DNA
aaggcaggttcatcaaagcag

SEQ ID NO: 1437 - DNA, 21 bp, synthetic construct
  source 1..21: mol_type = other DNA
cctgctttgatgaacctgcct

SEQ ID NO: 1438 - DNA, 21 bp, synthetic construct
  source 1..21: mol_type = other DNA
attgagaaacttgctttgaag

SEQ ID NO: 1439 - DNA, 21 bp, synthetic construct
  source 1..21: mol_type = other DNA
atgaacctgccttcaaagcaa

SEQ ID NO: 1440 - DNA, 21 bp, synthetic construct
  source 1..21: mol_type = other DNA
tcaatcaaaattagaagagag

SEQ ID NO: 1441 - DNA, 21 bp, synthetic construct
  source 1..21: mol_type = other DNA
aattattctgattttaggtga

SEQ ID NO: 1442 - DNA, 21 bp, synthetic construct
  source 1..21: mol_type = other DNA
ggtgaaatctgtgactgttgc

SEQ ID NO: 1443 - DNA, 21 bp, synthetic construct
  source 1..21: mol_type = other DNA
atgtcactgtgaagatgagca

SEQ ID NO: 1444 - DNA, 21 bp, synthetic construct
  source 1..21: mol_type = other DNA
agattttgagtctgtcagcaa

SEQ ID NO: 1445 - DNA, 21 bp, synthetic construct
  source 1..21: mol_type = other DNA
agtctgtcagcaagataacca

SEQ ID NO: 1446 - DNA, 21 bp, synthetic construct
  source 1..21: mol_type = other DNA
tcttgtctggcacagcataaa

SEQ ID NO: 1447 - DNA, 21 bp, synthetic construct
  source 1..21: mol_type = other DNA
tctttaggtttctgtttatgc

SEQ ID NO: 1448 - DNA, 21 bp, synthetic construct
  source 1..21: mol_type = other DNA
ggtttctgtttatgctgtgcc

SEQ ID NO: 1449 - DNA, 21 bp, synthetic construct
  source 1..21: mol_type = other DNA
tgtttatgctgtgccagacaa

SEQ ID NO: 1450 - DNA, 21 bp, synthetic construct
  source 1..21: mol_type = other DNA
tgctgtgccagacaagataaa

SEQ ID NO: 1451 - DNA, 21 bp, synthetic construct
  source 1..21: mol_type = other DNA
ggtaggggatacggtatgctg

SEQ ID NO: 1452 - DNA, 21 bp, synthetic construct
  source 1..21: mol_type = other DNA
tgaggattatttcagcatacc

SEQ ID NO: 1453 - DNA, 21 bp, synthetic construct
  source 1..21: mol_type = other DNA
agcataccgtatcccctaccc

SEQ ID NO: 1454 - DNA, 21 bp, synthetic construct
  source 1..21: mol_type = other DNA
ttacttccttcccaagatctt

SEQ ID NO: 1455 - DNA, 21 bp, synthetic construct
  source 1..21: mol_type = other DNA
catagcaccagactgaaagtc

SEQ ID NO: 1456 - DNA, 21 bp, synthetic construct
  source 1..21: mol_type = other DNA
agtctggtgctatggaaaact

SEQ ID NO: 1457 - DNA, 21 bp, synthetic construct
  source 1..21: mol_type = other DNA
tgcatcaaacaacagagcaga

SEQ ID NO: 1458 - DNA, 21 bp, synthetic construct
  source 1..21: mol_type = other DNA
atgcagaaaagtcttctgcat

SEQ ID NO: 1459 - DNA, 21 bp, synthetic construct
  source 1..21: mol_type = other DNA
gtggtttgggaacctggtcac

SEQ ID NO: 1460 - DNA, 21 bp, synthetic construct
  source 1..21: mol_type = other DNA
ggaacctggtcactatggaat

SEQ ID NO: 1461 - DNA, 21 bp, synthetic construct
  source 1..21: mol_type = other DNA
gccaaagatcattccaccatt

SEQ ID NO: 1462 - DNA, 21 bp, synthetic construct
  source 1..21: mol_type = other DNA
gcaaatccttcatttagccaa

SEQ ID NO: 1463 - DNA, 21 bp, synthetic construct
  source 1..21: mol_type = other DNA
gctaaatgaaggatttgccaa

SEQ ID NO: 1464 - DNA, 21 bp, synthetic construct
  source 1..21: mol_type = other DNA
ccaaatttatggagtttgtgt

SEQ ID NO: 1465 - DNA, 21 bp, synthetic construct
  source 1..21: mol_type = other DNA
agttcaggatgggtcacactg

SEQ ID NO: 1466 - DNA, 21 bp, synthetic construct
  source 1..21: mol_type = other DNA
tggagtttgtgtctgtcagtg

SEQ ID NO: 1467 - DNA, 21 bp, synthetic construct
  source 1..21: mol_type = other DNA
tgtctgtcagtgtgacccatc

SEQ ID NO: 1468 - DNA, 21 bp, synthetic construct
  source 1..21: mol_type = other DNA
ccaaagaaataatctccctat

SEQ ID NO: 1469 - DNA, 21 bp, synthetic construct
  source 1..21: mol_type = other DNA
ttttttctatctcaataggga

SEQ ID NO: 1470 - DNA, 21 bp, synthetic construct
  source 1..21: mol_type = other DNA
tatctcaatagggagattatt

SEQ ID NO: 1471 - DNA, 21 bp, synthetic construct
  source 1..21: mol_type = other DNA
aagcatctacctccattgcgt

SEQ ID NO: 1472 - DNA, 21 bp, synthetic construct
  source 1..21: mol_type = other DNA
tttggcaaatgttttgacgca

SEQ ID NO: 1473 - DNA, 21 bp, synthetic construct
  source 1..21: mol_type = other DNA
gcaaatgttttgacgcaatgg

SEQ ID NO: 1474 - DNA, 21 bp, synthetic construct
  source 1..21: mol_type = other DNA
acgcaatggaggtagatgctt

SEQ ID NO: 1475 - DNA, 21 bp, synthetic construct
  source 1..21: mol_type = other DNA
cacaggtgtagacacagggtg

SEQ ID NO: 1476 - DNA, 21 bp, synthetic construct
  source 1..21: mol_type = other DNA
aattcctcacaccctgtgtct

SEQ ID NO: 1477 - DNA, 21 bp, synthetic construct
  source 1..21: mol_type = other DNA
ccttatcataagaaacatcat

SEQ ID NO: 1478 - DNA, 21 bp, synthetic construct
  source 1..21: mol_type = other DNA
atgatgtttcttatgataagg

SEQ ID NO: 1479 - DNA, 21 bp, synthetic construct
  source 1..21: mol_type = other DNA
tattatcttttcagggagctt

SEQ ID NO: 1480 - DNA, 21 bp, synthetic construct
  source 1..21: mol_type = other DNA
agggagcttgtattctgaata

SEQ ID NO: 1481 - DNA, 21 bp, synthetic construct
  source 1..21: mol_type = other DNA
aatgcgtcagcactaagatac

SEQ ID NO: 1482 - DNA, 21 bp, synthetic construct
  source 1..21: mol_type = other DNA
tagctatgcttctggagatac

SEQ ID NO: 1483 - DNA, 21 bp, synthetic construct
  source 1..21: mol_type = other DNA
aaagtggtattgtacagtatc

SEQ ID NO: 1484 - DNA, 21 bp, synthetic construct
  source 1..21: mol_type = other DNA
tatttttatagctatgcttct

SEQ ID NO: 1485 - DNA, 21 bp, synthetic construct
  source 1..21: mol_type = other DNA
caccatctgtagggcaaatct

SEQ ID NO: 1486 - DNA, 21 bp, synthetic construct
  source 1..21: mol_type = other DNA
tttttggtttttagatttgcc

SEQ ID NO: 1487 - DNA, 21 bp, synthetic construct
  source 1..21: mol_type = other DNA
gtttttagatttgccctacag

SEQ ID NO: 1488 - DNA, 21 bp, synthetic construct
  source 1..21: mol_type = other DNA
gatttgccctacagatggtgt

SEQ ID NO: 1489 - DNA, 21 bp, synthetic construct
  source 1..21: mol_type = other DNA
ccctacagatggtgtaaaagg

SEQ ID NO: 1490 - DNA, 21 bp, synthetic construct
  source 1..21: mol_type = other DNA
ctctagaagtcaacattcatc

SEQ ID NO: 1491 - DNA, 21 bp, synthetic construct
  source 1..21: mol_type = other DNA
tgtacacaccagcattggcat

SEQ ID NO: 1492 - DNA, 21 bp, synthetic construct
  source 1..21: mol_type = other DNA
acatccaccccttcctgatgc

SEQ ID NO: 1493 - DNA, 21 bp, synthetic construct
  source 1..21: mol_type = other DNA
ccctaataaccatcacagtga

SEQ ID NO: 1494 - DNA, 21 bp, synthetic construct
  source 1..21: mol_type = other DNA
ctctaggagcattacccagtg

SEQ ID NO: 1495 - DNA, 21 bp, synthetic construct
  source 1..21: mol_type = other DNA
ttttaggtacctgtggcatgt

SEQ ID NO: 1496 - DNA, 21 bp, synthetic construct
  source 1..21: mol_type = other DNA
ctggtgatgaatgtcaatgga

SEQ ID NO: 1497 - DNA, 21 bp, synthetic construct
  source 1..21: mol_type = other DNA
ggtacctgtggcatgttccat

SEQ ID NO: 1498 - DNA, 21 bp, synthetic construct
  source 1..21: mol_type = other DNA
gcaaaaatcgatggaccatgt

SEQ ID NO: 1499 - DNA, 21 bp, synthetic construct
  source 1..21: mol_type = other DNA
tttttagcaaaaatcgatgga

SEQ ID NO: 1500 - DNA, 21 bp, synthetic construct
  source 1..21: mol_type = other DNA
caaaataaattacctgttttt

SEQ ID NO: 1501 - DNA, 21 bp, synthetic construct
  source 1..21: mol_type = other DNA
atttattttatttactctaga

SEQ ID NO: 1502 - DNA, 21 bp, synthetic construct
  source 1..21: mol_type = other DNA
ttttatttactctagatgtgc

SEQ ID NO: 1503 - DNA, 21 bp, synthetic construct
  source 1..21: mol_type = other DNA
tttactctagatgtgctcatc

SEQ ID NO: 1504 - DNA, 21 bp, synthetic construct
  source 1..21: mol_type = other DNA
ctctagatgtgctcatcctcc

SEQ ID NO: 1505 - DNA, 21 bp, synthetic construct
  source 1..21: mol_type = other DNA
atccattccacctcttctggg

SEQ ID NO: 1506 - DNA, 21 bp, synthetic construct
  source 1..21: mol_type = other DNA
atgtgggcatgaatggctatt

SEQ ID NO: 1507 - DNA, 21 bp, synthetic construct
  source 1..21: mol_type = other DNA
aaaggccagtcaaagagtccc

SEQ ID NO: 1508 - DNA, 21 bp, synthetic construct
  source 1..21: mol_type = other DNA
actggccttttaaaaggaaca

SEQ ID NO: 1509 - DNA, 21 bp, synthetic construct
  source 1..21: mol_type = other DNA
aaaggaacacacacagcagtc

SEQ ID NO: 1510 - DNA, 21 bp, synthetic construct
  source 1..21: mol_type = other DNA
tgcagcgtgtattacctgacg

SEQ ID NO: 1511 - DNA, 21 bp, synthetic construct
  source 1..21: mol_type = other DNA
aagtacagggataaatccaag

SEQ ID NO: 1512 - DNA, 21 bp, synthetic construct
  source 1..21: mol_type = other DNA
atgtttcaagtacagggataa

SEQ ID NO: 1513 - DNA, 21 bp, synthetic construct
  source 1..21: mol_type = other DNA
agtttcatgtttcaagtacag

SEQ ID NO: 1514 - DNA, 21 bp, synthetic construct
  source 1..21: mol_type = other DNA
tccctgtacttgaaacatgaa

SEQ ID NO: 1515 - DNA, 21 bp, synthetic construct
  source 1..21: mol_type = other DNA
aaggtttgaatgagctgattc

SEQ ID NO: 1516 - DNA, 21 bp, synthetic construct
  source 1..21: mol_type = other DNA
tccattaacttatacatagga

SEQ ID NO: 1517 - DNA, 21 bp, synthetic construct
  source 1..21: mol_type = other DNA
aatgagctgattcctatgtat

SEQ ID NO: 1518 - DNA, 21 bp, synthetic construct
  source 1..21: mol_type = other DNA
cacttcattcatatctctttt

SEQ ID NO: 1519 - DNA, 21 bp, synthetic construct
  source 1..21: mol_type = other DNA
ccttgaattgagtttccactt

SEQ ID NO: 1520 - DNA, 21 bp, synthetic construct
  source 1..21: mol_type = other DNA
aggcttttaccttgaattgag

SEQ ID NO: 1521 - DNA, 21 bp, synthetic construct
  source 1..21: mol_type = other DNA
tttcaggcttttaccttgaat

SEQ ID NO: 1522 - DNA, 21 bp, synthetic construct
  source 1..21: mol_type = other DNA
cctgtacaacgccctcaggcc

SEQ ID NO: 1523 - DNA, 21 bp, synthetic construct
  source 1..21: mol_type = other DNA
tgaaatagccttctgccctct

SEQ ID NO: 1524 - DNA, 21 bp, synthetic construct
  source 1..21: mol_type = other DNA
cattggattccttccactttc

SEQ ID NO: 1525 - DNA, 21 bp, synthetic construct
  source 1..21: mol_type = other DNA
agaaagtggaaggaatccaat

SEQ ID NO: 1526 - DNA, 21 bp, synthetic construct
  source 1..21: mol_type = other DNA
gtaaggactgacctcaagttt

SEQ ID NO: 1527 - DNA, 21 bp, synthetic construct
  source 1..21: mol_type = other DNA
ttttcttaatccttctaggct

SEQ ID NO: 1528 - DNA, 21 bp, synthetic construct
  source 1..21: mol_type = other DNA
ttaatccttctaggctactag

SEQ ID NO: 1529 - DNA, 21 bp, synthetic construct
  source 1..21: mol_type = other DNA
tctcccttaaagctttcatct

SEQ ID NO: 1530 - DNA, 21 bp, synthetic construct
  source 1..21: mol_type = other DNA
ttttatctcccttaaagcttt

SEQ ID NO: 1531 - DNA, 21 bp, synthetic construct
  source 1..21: mol_type = other DNA
tggaaactcctgagtttttat

SEQ ID NO: 1532 - DNA, 21 bp, synthetic construct
  source 1..21: mol_type = other DNA
agggagataaaataaaaactc

SEQ ID NO: 1533 - DNA, 21 bp, synthetic construct
  source 1..21: mol_type = other DNA
cacaaattcttacactcattg

SEQ ID NO: 1534 - DNA, 21 bp, synthetic construct
  source 1..21: mol_type = other DNA
ctcagaaattgccaggccagt

SEQ ID NO: 1535 - DNA, 21 bp, synthetic construct
  source 1..21: mol_type = other DNA
ttccagtttttcctcagaaat

SEQ ID NO: 1536 - DNA, 21 bp, synthetic construct
  source 1..21: mol_type = other DNA
tacaagtttgttccagttttt

SEQ ID NO: 1537 - DNA, 21 bp, synthetic construct
  source 1..21: mol_type = other DNA
tgaggaaaaactggaacaaac

SEQ ID NO: 1538 - DNA, 21 bp, synthetic construct
  source 1..21: mol_type = other DNA
gcaccacttacttttgtacaa

SEQ ID NO: 1539 - DNA, 21 bp, synthetic construct
  source 1..21: mol_type = other DNA
aatatttccctctctaggttt

SEQ ID NO: 1540 - DNA, 21 bp, synthetic construct
  source 1..21: mol_type = other DNA
cctctctaggtttgaacttgg

SEQ ID NO: 1541 - DNA, 21 bp, synthetic construct
  source 1..21: mol_type = other DNA
aacttggctcatcttccatag

SEQ ID NO: 1542 - DNA, 21 bp, synthetic construct
  source 1..21: mol_type = other DNA
ttgtacccattaccatgtggg

SEQ ID NO: 1543 - DNA, 21 bp, synthetic construct
  source 1..21: mol_type = other DNA
cctcttcaagccgtgttcttg

SEQ ID NO: 1544 - DNA, 21 bp, synthetic construct
  source 1..21: mol_type = other DNA
aaagagctgaagaatcctttt

SEQ ID NO: 1545 - DNA, 21 bp, synthetic construct
  source 1..21: mol_type = other DNA
tttcaaagagctgaagaatcc

SEQ ID NO: 1546 - DNA, 21 bp, synthetic construct
  source 1..21: mol_type = other DNA
ctcacaaggtaaaaggattct

SEQ ID NO: 1547 - DNA, 21 bp, synthetic construct
  source 1..21: mol_type = other DNA
aaagaaaatggttctcagctc

SEQ ID NO: 1548 - DNA, 21 bp, synthetic construct
  source 1..21: mol_type = other DNA
aattgtctgttggacacaacg

SEQ ID NO: 1549 - DNA, 21 bp, synthetic construct
  source 1..21: mol_type = other DNA
ttcaatggtttcaattgtctg

SEQ ID NO: 1550 - DNA, 21 bp, synthetic construct
  source 1..21: mol_type = other DNA
tcaaaattcttatccatccaa

SEQ ID NO: 1551 - DNA, 21 bp, synthetic construct
  source 1..21: mol_type = other DNA
cagccacactctgattttatc

SEQ ID NO: 1552 - DNA, 21 bp, synthetic construct
  source 1..21: mol_type = other DNA
actttgcagccacactctgat

SEQ ID NO: 1553 - DNA, 21 bp, synthetic construct
  source 1..21: mol_type = other DNA
ataaaatcagagtgtggctgc

SEQ ID NO: 1554 - DNA, 21 bp, synthetic construct
  source 1..21: mol_type = other DNA
catacgttcaagcttttcact

SEQ ID NO: 1555 - DNA, 21 bp, synthetic construct
  source 1..21: mol_type = other DNA
tcctaccccttgtcatgcagg

SEQ ID NO: 1556 - DNA, 21 bp, synthetic construct
  source 1..21: mol_type = other DNA
cttttttattttcttacagtg

SEQ ID NO: 1557 - DNA, 21 bp, synthetic construct
  source 1..21: mol_type = other DNA
ttttcttacagtgcctacacc

SEQ ID NO: 1558 - DNA, 21 bp, synthetic construct
  source 1..21: mol_type = other DNA
ttacagtgcctacaccaacta

SEQ ID NO: 1559 - DNA, 21 bp, synthetic construct
  source 1..21: mol_type = other DNA
cctctacggtaaaaacaggga

SEQ ID NO: 1560 - DNA, 21 bp, synthetic construct
  source 1..21: mol_type = other DNA
ccgtagaggtaaagaactatg

SEQ ID NO: 1561 - DNA, 21 bp, synthetic construct
  source 1..21: mol_type = other DNA
ttctttttagtgttaagaatt

SEQ ID NO: 1562 - DNA, 21 bp, synthetic construct
  source 1..21: mol_type = other DNA
gtgttaagaattcagaatgga

SEQ ID NO: 1563 - DNA, 21 bp, synthetic construct
  source 1..21: mol_type = other DNA
tcatcattattgtaatatttc

SEQ ID NO: 1564 - DNA, 21 bp, synthetic construct
  source 1..21: mol_type = other DNA
atggatcaccaacatgatcag

SEQ ID NO: 1565 - DNA, 21 bp, synthetic construct
  source 1..21: mol_type = other DNA
tgatcatgttggtgatccatc

SEQ ID NO: 1566 - DNA, 21 bp, synthetic construct
  source 1..21: mol_type = other DNA
actctgacccaaagagaattt

SEQ ID NO: 1567 - DNA, 21 bp, synthetic construct
  source 1..21: mol_type = other DNA
tccaaccctggctttaactct

SEQ ID NO: 1568 - DNA, 21 bp, synthetic construct
  source 1..21: mol_type = other DNA
ggtcagagttaaagccagggt

SEQ ID NO: 1569 - DNA, 21 bp, synthetic construct
  source 1..21: mol_type = other DNA
cataggcagattctttttgtc

SEQ ID NO: 1570 - DNA, 21 bp, synthetic construct
  source 1..21: mol_type = other DNA
ggtggtccaatttttcctggg

SEQ ID NO: 1571 - DNA, 21 bp, synthetic construct
  source 1..21: mol_type = other DNA
tgatatccagtttaggtggtc

SEQ ID NO: 1572 - DNA, 21 bp, synthetic construct
  source 1..21: mol_type = other DNA
cttctcctcctttctgatatc

SEQ ID NO: 1573 - DNA, 21 bp, synthetic construct
  source 1..21: mol_type = other DNA
caaaaactgaagggtgaaata

SEQ ID NO: 1574 - DNA, 21 bp, synthetic construct
  source 1..21: mol_type = other DNA
acccttcagtttttgtaaatg

SEQ ID NO: 1575 - DNA, 21 bp, synthetic construct
  source 1..21: mol_type = other DNA
gggatcataatcgacttcctg

SEQ ID NO: 1576 - DNA, 21 bp, synthetic construct
  source 1..21: mol_type = other DNA
taaatggagacgagcaggaag

SEQ ID NO: 1577 - DNA, 21 bp, synthetic construct
  source 1..21: mol_type = other DNA
ttttttcatctagatccagta

SEQ ID NO: 1578 - DNA, 21 bp, synthetic construct
  source 1..21: mol_type = other DNA
atctagatccagtataaaata

SEQ ID NO: 1579 - DNA, 21 bp, synthetic construct
  source 1..21: mol_type = other DNA
agttgtaacaccccacacatg

SEQ ID NO: 1580 - DNA, 21 bp, synthetic construct
  source 1..21: mol_type = other DNA
agcagaaggagtcttacatgt

SEQ ID NO: 1581 - DNA, 21 bp, synthetic construct
  source 1..21: mol_type = other DNA
acttttcagttgtaacacccc

SEQ ID NO: 1582 - DNA, 21 bp, synthetic construct
  source 1..21: mol_type = other DNA
tactgctattgaaaatggtaa

SEQ ID NO: 1583 - DNA, 21 bp, synthetic construct
  source 1..21: mol_type = other DNA
tattaccattttcaatagcag

SEQ ID NO: 1584 - DNA, 21 bp, synthetic construct
  source 1..21: mol_type = other DNA
tgccttttttaaggttctctt

SEQ ID NO: 1585 - DNA, 21 bp, synthetic construct
  source 1..21: mol_type = other DNA
aggttctctttggattccagt

SEQ ID NO: 1586 - DNA, 21 bp, synthetic construct
  source 1..21: mol_type = other DNA
gattccagttgttgctgcttt

SEQ ID NO: 1587 - DNA, 21 bp, synthetic construct
  source 1..21: mol_type = other DNA
ctactctttctagtgcttagc

SEQ ID NO: 1588 - DNA, 21 bp, synthetic construct
  source 1..21: mol_type = other DNA
ttaatataaaaacagatgaat

SEQ ID NO: 1589 - DNA, 21 bp, synthetic construct
  source 1..21: mol_type = other DNA
tagtgcttagcctggtattca

SEQ ID NO: 1590 - DNA, 21 bp, synthetic construct
  source 1..21: mol_type = other DNA
cttcaatggattaattttctt

SEQ ID NO: 1591 - DNA, 21 bp, synthetic construct
  source 1..21: mol_type = other DNA
tattaagaaaattaatccatt

SEQ ID NO: 1592 - DNA, 21 bp, synthetic construct
  source 1..21: mol_type = other DNA
atcaatttttctccccataga

SEQ ID NO: 1593 - DNA, 21 bp, synthetic construct
  source 1..21: mol_type = other DNA
tccccatagatctctgtggta

SEQ ID NO: 1594 - DNA, 21 bp, synthetic construct
  source 1..21: mol_type = other DNA
tctctaaagtagcacttctta

SEQ ID NO: 1595 - DNA, 21 bp, synthetic construct
  source 1..21: mol_type = other DNA
attcaggttttgtctctaaag

SEQ ID NO: 1596 - DNA, 21 bp, synthetic construct
  source 1..21: mol_type = other DNA
gagacaaaacctgaatcaaaa

SEQ ID NO: 1597 - DNA, 21 bp, synthetic construct
  source 1..21: mol_type = other DNA
taaggaaaatggctggtatga

SEQ ID NO: 1598 - DNA, 21 bp, synthetic construct
  source 1..21: mol_type = other DNA
cttagaaaaggaggtggtctg

SEQ ID NO: 1599 - DNA, 21 bp, synthetic construct
  source 1..21: mol_type = other DNA
ctggattgtcttcggtatgca

SEQ ID NO: 1600 - DNA, 21 bp, synthetic construct
  source 1..21: mol_type = other DNA
ttcagtagtcaccacttctgt

SEQ ID NO: 1601 - DNA, 21 bp, synthetic construct
  source 1..21: mol_type = other DNA
tagtataacagaagtggtgac

SEQ ID NO: 1602 - DNA, 21 bp, synthetic construct
  source 1..21: mol_type = other DNA
aagcgatgctgccaggttcag

SEQ ID NO: 1603 - DNA, 21 bp, synthetic construct
  source 1..21: mol_type = other DNA
agtagtaaccagtctgaacct

SEQ ID NO: 1604 - DNA, 21 bp, synthetic construct
  source 1..21: mol_type = other DNA
tggagtgatacgagtttaaag

SEQ ID NO: 1605 - DNA, 21 bp, synthetic construct
  source 1..21: mol_type = other DNA
aactcgtatcactccagaaat

SEQ ID NO: 1606 - DNA, 21 bp, synthetic construct
  source 1..21: mol_type = other DNA
tggagtgatcactctcagaac

SEQ ID NO: 1607 - DNA, 21 bp, synthetic construct
  source 1..21: mol_type = other DNA
atactgattccagctgtctgg

SEQ ID NO: 1608 - DNA, 21 bp, synthetic construct
  source 1..21: mol_type = other DNA
ggggaaattctgagtcagata

SEQ ID NO: 1609 - DNA, 21 bp, synthetic construct
  source 1..21: mol_type = other DNA
ttatttgggggaaattctgag

SEQ ID NO: 1610 - DNA, 21 bp, synthetic construct
  source 1..21: mol_type = other DNA
acctttattatttgggggaaa

SEQ ID NO: 1611 - DNA, 21 bp, synthetic construct
  source 1..21: mol_type = other DNA
tttcacctttattatttgggg

SEQ ID NO: 1612 - DNA, 21 bp, synthetic construct
  source 1..21: mol_type = other DNA
ccccaaataataaaggtgaaa

SEQ ID NO: 1613 - DNA, 21 bp, synthetic construct
  source 1..21: mol_type = other DNA
ttacggttatgagctcttgtc

SEQ ID NO: 1614 - DNA, 21 bp, synthetic construct
  source 1..21: mol_type = other DNA
tcataaccaaaggaggtgggg

SEQ ID NO: 1615 - DNA, 21 bp, synthetic construct
  source 1..21: mol_type = other DNA
gttatgataaaccacatgtgc

SEQ ID NO: 1616 - DNA, 21 bp, synthetic construct
  source 1..21: mol_type = other DNA
ccgctatcatccacaagtaga

SEQ ID NO: 1617 - DNA, 21 bp, synthetic construct
  source 1..21: mol_type = other DNA
gaatcttctgttggtctataa

SEQ ID NO: 1618 - DNA, 21 bp, synthetic construct
  source 1..21: mol_type = other DNA
tctgtccccctcaagaccctc

SEQ ID NO: 1619 - DNA, 21 bp, synthetic construct
  source 1..21: mol_type = other DNA
ccagctgcccgctcctcagca

SEQ ID NO: 1620 - DNA, 21 bp, synthetic construct
  source 1..21: mol_type = other DNA
aactgcacttggtagacaaca

SEQ ID NO: 1621 - DNA, 21 bp, synthetic construct
  source 1..21: mol_type = other DNA
aatagtaagccggtatttctg

SEQ ID NO: 1622 - DNA, 21 bp, synthetic construct
  source 1..21: mol_type = other DNA
cttcccagcaccgacagtaaa

SEQ ID NO: 1623 - DNA, 21 bp, synthetic construct
  source 1..21: mol_type = other DNA
aatgtcactctacgccttcga

SEQ ID NO: 1624 - DNA, 21 bp, synthetic construct
  source 1..21: mol_type = other DNA
tggaggcccgacagtcactga

SEQ ID NO: 1625 - DNA, 21 bp, synthetic construct
  source 1..21: mol_type = other DNA
tctttgtaattctttttcagt

SEQ ID NO: 1626 - DNA, 21 bp, synthetic construct
  source 1..21: mol_type = other DNA
taattctttttcagtgactgt

SEQ ID NO: 1627 - DNA, 21 bp, synthetic construct
  source 1..21: mol_type = other DNA
agtgactgtcgggcctccaga

SEQ ID NO: 1628 - DNA, 21 bp, synthetic construct
  source 1..21: mol_type = other DNA
acatcgctgatacctccacgg

SEQ ID NO: 1629 - DNA, 21 bp, synthetic construct
  source 1..21: mol_type = other DNA
ccagtaatggacataataaca

SEQ ID NO: 1630 - DNA, 21 bp, synthetic construct
  source 1..21: mol_type = other DNA
ttattatgtccattactggga

SEQ ID NO: 1631 - DNA, 21 bp, synthetic construct
  source 1..21: mol_type = other DNA
aaacaggtcaaaggccctttc

SEQ ID NO: 1632 - DNA, 21 bp, synthetic construct
  source 1..21: mol_type = other DNA
agttatccaatgaaatggagt

SEQ ID NO: 1633 - DNA, 21 bp, synthetic construct
  source 1..21: mol_type = other DNA
agaagcaactccatttcattg

SEQ ID NO: 1634 - DNA, 21 bp, synthetic construct
  source 1..21: mol_type = other DNA
attggataacttaaaaccctc

SEQ ID NO: 1635 - DNA, 21 bp, synthetic construct
  source 1..21: mol_type = other DNA
ttccaaagcagttgtgcctgg

SEQ ID NO: 1636 - DNA, 21 bp, synthetic construct
  source 1..21: mol_type = other DNA
caagtccaggcacaactgctt

SEQ ID NO: 1637 - DNA, 21 bp, synthetic construct
  source 1..21: mol_type = other DNA
gaacaaaagtaacatctttag

SEQ ID NO: 1638 - DNA, 21 bp, synthetic construct
  source 1..21: mol_type = other DNA
gtagcaagatatgttgcttaa

SEQ ID NO: 1639 - DNA, 21 bp, synthetic construct
  source 1..21: mol_type = other DNA
gagtcgggcatttaagcaaca

SEQ ID NO: 1640 - DNA, 21 bp, synthetic construct
  source 1..21: mol_type = other DNA
ccatctgccattgtttcgtag

SEQ ID NO: 1641 - DNA, 21 bp, synthetic construct
  source 1..21: mol_type = other DNA
agcaacatatcttgctacgaa

SEQ ID NO: 1642 - DNA, 21 bp, synthetic construct
  source 1..21: mol_type = other DNA
gtgtcctctttttagcctcca

SEQ ID NO: 1643 - DNA, 21 bp, synthetic construct
  source 1..21: mol_type = other DNA
gcctccactgagcttcagcaa

SEQ ID NO: 1644 - DNA, 21 bp, synthetic construct
  source 1..21: mol_type = other DNA
gttgctgtcggtgctggcagg

SEQ ID NO: 1645 - DNA, 21 bp, synthetic construct
  source 1..21: mol_type = other DNA
aggaccaggaagaaacaggct

SEQ ID NO: 1646 - DNA, 21 bp, synthetic construct
  source 1..21: mol_type = other DNA
atcaggcctctatatttcagg

SEQ ID NO: 1647 - DNA, 21 bp, synthetic construct
  source 1..21: mol_type = other DNA
ttcctggtcctgaaatataga

SEQ ID NO: 1648 - DNA, 21 bp, synthetic construct
  source 1..21: mol_type = other DNA
acactccaccaagcatcccat

SEQ ID NO: 1649 - DNA, 21 bp, synthetic construct
  source 1..21: mol_type = other DNA
ctttccaacctcctcaagtat

SEQ ID NO: 1650 - DNA, 21 bp, synthetic construct
  source 1..21: mol_type = other DNA
caacctcctcaagtatttaaa

SEQ ID NO: 1651 - DNA, 21 bp, synthetic construct
  source 1..21: mol_type = other DNA
aaagacccaactcagcccatc

SEQ ID NO: 1652 - DNA, 21 bp, synthetic construct
  source 1..21: mol_type = other DNA
gtgagctgtccttgtccaagg

SEQ ID NO: 1653 - DNA, 21 bp, synthetic construct
  source 1..21: mol_type = other DNA
cggaaacgagataatggacac

SEQ ID NO: 1654 - DNA, 21 bp, synthetic construct
  source 1..21: mol_type = other DNA
gagaacatcttcttgctcctt

SEQ ID NO: 1655 - DNA, 21 bp, synthetic construct
  source 1..21: mol_type = other DNA
cggaaaaggagcaagaagatg

SEQ ID NO: 1656 - DNA, 21 bp, synthetic construct
  source 1..21: mol_type = other DNA
gttcaaagcgtttggagaaca

SEQ ID NO: 1657 - DNA, 21 bp, synthetic construct
  source 1..21: mol_type = other DNA
aaaatatgcaaatctacatac

SEQ ID NO: 1658 - DNA, 21 bp, synthetic construct
  source 1..21: mol_type = other DNA
cttccacaacagtatctaaat

SEQ ID NO: 1659 - DNA, 21 bp, synthetic construct
  source 1..21: mol_type = other DNA
gcacagaaagccatggcattg

SEQ ID NO: 1660 - DNA, 21 bp, synthetic construct
  source 1..21: mol_type = other DNA
tgtgctaaaatgaggagctcc

SEQ ID NO: 1661 - DNA, 21 bp, synthetic construct
  source 1..21: mol_type = other DNA
cttttcctcaggtatctctcc

SEQ ID NO: 1662 - DNA, 21 bp, synthetic construct
  source 1..21: mol_type = other DNA
ctcaggtatctctcctctttg

SEQ ID NO: 1663 - DNA, 21 bp, synthetic construct
  source 1..21: mol_type = other DNA
tcacaacctctttgccctgta

SEQ ID NO: 1664 - DNA, 21 bp, synthetic construct
  source 1..21: mol_type = other DNA
gagcataccagagcttggtgt

SEQ ID NO: 1665 - DNA, 21 bp, synthetic construct
  source 1..21: mol_type = other DNA
ccctgtatgacgagaacacca

SEQ ID NO: 1666 - DNA, 21 bp, synthetic construct
  source 1..21: mol_type = other DNA
ctgccttccaggttctatttc

SEQ ID NO: 1667 - DNA, 21 bp, synthetic construct
  source 1..21: mol_type = other DNA
accaattggcatggaaccaac

SEQ ID NO: 1668 - DNA, 21 bp, synthetic construct
  source 1..21: mol_type = other DNA
gagaatgacgccacactgact

SEQ ID NO: 1669 - DNA, 21 bp, synthetic construct
  source 1..21: mol_type = other DNA
tgcttctttggagaatgacgc

SEQ ID NO: 1670 - DNA, 21 bp, synthetic construct
  source 1..21: mol_type = other DNA
tcgtagccatttttctgcttc

SEQ ID NO: 1671 - DNA, 21 bp, synthetic construct
  source 1..21: mol_type = other DNA
accaaatcatactgtccctag

SEQ ID NO: 1672 - DNA, 21 bp, synthetic construct
  source 1..21: mol_type = other DNA
tcccccttgctcctagggaca

SEQ ID NO: 1673 - DNA, 21 bp, synthetic construct
  source 1..21: mol_type = other DNA
gtgaaatgcctggctcctatt

SEQ ID NO: 1674 - DNA, 21 bp, synthetic construct
  source 1..21: mol_type = other DNA
cctgatgtccttgggcagttc

SEQ ID NO: 1675 - DNA, 21 bp, synthetic construct
  source 1..21: mol_type = other DNA
tggaatatatcgcttgtagct

SEQ ID NO: 1676 - DNA, 21 bp, synthetic construct
  source 1..21: mol_type = other DNA
tactgtcttttagctacaagc

SEQ ID NO: 1677 - DNA, 21 bp, synthetic construct
  source 1..21: mol_type = other DNA
gctacaagcgatatattccag

SEQ ID NO: 1678 - DNA, 21 bp, synthetic construct
  source 1..21: mol_type = other DNA
tccgcatcctggtgagaaggt

SEQ ID NO: 1679 - DNA, 21 bp, synthetic construct
  source 1..21: mol_type = other DNA
ggaaatccttgaaaacattat

SEQ ID NO: 1680 - DNA, 21 bp, synthetic construct
  source 1..21: mol_type = other DNA
aaggatttcctaaaggaattt

SEQ ID NO: 1681 - DNA, 21 bp, synthetic construct
  source 1..21: mol_type = other DNA
ctaaaggaatttaacaacaag

SEQ ID NO: 1682 - DNA, 21 bp, synthetic construct
  source 1..21: mol_type = other DNA
acaacaagaccatttgtgaca

SEQ ID NO: 1683 - DNA, 21 bp, synthetic construct
  source 1..21: mol_type = other DNA
accttcaggtcatgcgtggac

SEQ ID NO: 1684 - DNA, 21 bp, synthetic construct
  source 1..21: mol_type = other DNA
tgacagcagcgtgtccacgca

SEQ ID NO: 1685 - DNA, 21 bp, synthetic construct
  source 1..21: mol_type = other DNA
caaggtagccaagtatttcac

SEQ ID NO: 1686 - DNA, 21 bp, synthetic construct
  source 1..21: mol_type = other DNA
tcaaagtttccaaggtagcca

SEQ ID NO: 1687 - DNA, 21 bp, synthetic construct
  source 1..21: mol_type = other DNA
agcaccgtaatgttttgtcaa

SEQ ID NO: 1688 - DNA, 21 bp, synthetic construct
  source 1..21: mol_type = other DNA
acaaaacattacggtgctgaa

SEQ ID NO: 1689 - DNA, 21 bp, synthetic construct
  source 1..21: mol_type = other DNA
tgatgaaatcagtaacatgga

SEQ ID NO: 1690 - DNA, 21 bp, synthetic construct
  source 1..21: mol_type = other DNA
agacttccatgttactgattt

SEQ ID NO: 1691 - DNA, 21 bp, synthetic construct
  source 1..21: mol_type = other DNA
atcagaaaatgagatgaattg

SEQ ID NO: 1692 - DNA, 21 bp, synthetic construct
  source 1..21: mol_type = other DNA
caccgtcattcgaatgaaacc

SEQ ID NO: 1693 - DNA, 21 bp, synthetic construct
  source 1..21: mol_type = other DNA
attcgaatgacggtggaaacg

SEQ ID NO: 1694 - DNA, 21 bp, synthetic construct
  source 1..21: mol_type = other DNA
tgcctccactggattccaaga

SEQ ID NO: 1695 - DNA, 21 bp, synthetic construct
  source 1..21: mol_type = other DNA
gtttatgcctccactggattc

SEQ ID NO: 1696 - DNA, 21 bp, synthetic construct
  source 1..21: mol_type = other DNA
cttttcaacagaaacaacctg

SEQ ID NO: 1697 - DNA, 21 bp, synthetic construct
  source 1..21: mol_type = other DNA
tgtatcttatcaggttgtttc

SEQ ID NO: 1698 - DNA, 21 bp, synthetic construct
  source 1..21: mol_type = other DNA
tttttttccttttcaacagaa

SEQ ID NO: 1699 - DNA, 21 bp, synthetic construct
  source 1..21: mol_type = other DNA
cgcttcagtttatttttttcc

SEQ ID NO: 1700 - DNA, 21 bp, synthetic construct
  source 1..21: mol_type = other DNA
tgttgaaaaggaaaaaaataa

SEQ ID NO: 1701 - DNA, 21 bp, synthetic construct
  source 1..21: mol_type = other DNA
cagttttttccgcttcagttt

SEQ ID NO: 1702 - DNA, 21 bp, synthetic construct
  source 1..21: mol_type = other DNA
ttttccagttttttccgcttc

SEQ ID NO: 1703 - DNA, 21 bp, synthetic construct
  source 1..21: mol_type = other DNA
tcctcatccttcttgtgttta

SEQ ID NO: 1704 - DNA, 21 bp, synthetic construct
  source 1..21: mol_type = other DNA
agggaagtaagaaaaattgtt

SEQ ID NO: 1705 - DNA, 21 bp, synthetic construct
  source 1..21: mol_type = other DNA
ttacaatgtgagtgatttcag

SEQ ID NO: 1706 - DNA, 21 bp, synthetic construct
  source 1..21: mol_type = other DNA
ttacttccctgaaatcactca

SEQ ID NO: 1707 - DNA, 21 bp, synthetic construct
  source 1..21: mol_type = other DNA
ttgttgtcctgcttgttaatg

SEQ ID NO: 1708 - DNA, 21 bp, synthetic construct
  source 1..21: mol_type = other DNA
ttctctctcaacaggaactga

SEQ ID NO: 1709 - DNA, 21 bp, synthetic construct
  source 1..21: mol_type = other DNA
tgtccctggtagatggctact

SEQ ID NO: 1710 - DNA, 21 bp, synthetic construct
  source 1..21: mol_type = other DNA
ttgatggcgtattctgtacta

SEQ ID NO: 1711 - DNA, 21 bp, synthetic construct
  source 1..21: mol_type = other DNA
cctacttctccctctagtaca

SEQ ID NO: 1712 - DNA, 21 bp, synthetic construct
  source 1..21: mol_type = other DNA
acaacatcctcatgaccgtca

SEQ ID NO: 1713 - DNA, 21 bp, synthetic construct
  source 1..21: mol_type = other DNA
ccgaatagcaggtgcagggtg

SEQ ID NO: 1714 - DNA, 21 bp, synthetic construct
  source 1..21: mol_type = other DNA
agatcgaggtgcagaagggcc

SEQ ID NO: 1715 - DNA, 21 bp, synthetic construct
  source 1..21: mol_type = other DNA
gcatgaagctgatgttatccg

SEQ ID NO: 1716 - DNA, 21 bp, synthetic construct
  source 1..21: mol_type = other DNA
ttagtagccaccagcaggttg

SEQ ID NO: 1717 - DNA, 21 bp, synthetic construct
  source 1..21: mol_type = other DNA
gatcggatcctcaagaaggat

SEQ ID NO: 1718 - DNA, 21 bp, synthetic construct
  source 1..21: mol_type = other DNA
tcttcttctcttcagaagttc

SEQ ID NO: 1719 - DNA, 21 bp, synthetic construct
  source 1..21: mol_type = other DNA
aggatcacttttatcttcttc

SEQ ID NO: 1720 - DNA, 21 bp, synthetic construct
  source 1..21: mol_type = other DNA
tgggagacctgtctcatcatg

SEQ ID NO: 1721 - DNA, 21 bp, synthetic construct
  source 1..21: mol_type = other DNA
aaagagaacacacttactctc

SEQ ID NO: 1722 - DNA, 21 bp, synthetic construct
  source 1..21: mol_type = other DNA
tgcctacagatatcatggtgg

SEQ ID NO: 1723 - DNA, 21 bp, synthetic construct
  source 1..21: mol_type = other DNA
cggtgcatgaagagatccaga

SEQ ID NO: 1724 - DNA, 21 bp, synthetic construct
  source 1..21: mol_type = other DNA
tggaagggggtcctctggatc

SEQ ID NO: 1725 - DNA, 21 bp, synthetic construct
  source 1..21: mol_type = other DNA
catggtgtggtaaggacatcg

SEQ ID NO: 1726 - DNA, 21 bp, synthetic construct
  source 1..21: mol_type = other DNA
aatttccatggtgtggtaagg

SEQ ID NO: 1727 - DNA, 21 bp, synthetic construct
  source 1..21: mol_type = other DNA
gcaactttgaatttccatggt

SEQ ID NO: 1728 - DNA, 21 bp, synthetic construct
  source 1..21: mol_type = other DNA
catggaccaggtctttatcct

SEQ ID NO: 1729 - DNA, 21 bp, synthetic construct
  source 1..21: mol_type = other DNA
ctctgcaggaggataaagacc

SEQ ID NO: 1730 - DNA, 21 bp, synthetic construct
  source 1..21: mol_type = other DNA
gtacacacatttccatggacc

SEQ ID NO: 1731 - DNA, 21 bp, synthetic construct
  source 1..21: mol_type = other DNA
ccagagcgtggttccaaagct

SEQ ID NO: 1732 - DNA, 21 bp, synthetic construct
  source 1..21: mol_type = other DNA
gaaccacgctctgggaaatct

SEQ ID NO: 1733 - DNA, 21 bp, synthetic construct
  source 1..21: mol_type = other DNA
aaggggatctcgccattgtag

SEQ ID NO: 1734 - DNA, 21 bp, synthetic construct
  source 1..21: mol_type = other DNA
cagaaagagagattctatgaa

SEQ ID NO: 1735 - DNA, 21 bp, synthetic construct
  source 1..21: mol_type = other DNA
ttccgagccatcatgagagac

SEQ ID NO: 1736 - DNA, 21 bp, synthetic construct
  source 1..21: mol_type = other DNA
tgaaacaatatctggatctaa

SEQ ID NO: 1737 - DNA, 21 bp, synthetic construct
  source 1..21: mol_type = other DNA
ttttctcttctgttagatcca

SEQ ID NO: 1738 - DNA, 21 bp, synthetic construct
  source 1..21: mol_type = other DNA
tcttctgttagatccagatat

SEQ ID NO: 1739 - DNA, 21 bp, synthetic construct
  source 1..21: mol_type = other DNA
agaaaaaaaaccagcaactga

SEQ ID NO: 1740 - DNA, 21 bp, synthetic construct
  source 1..21: mol_type = other DNA
aaaatgtgtggggtccacttc

SEQ ID NO: 1741 - DNA, 21 bp, synthetic construct
  source 1..21: mol_type = other DNA
ggaagcgcttttcaaaatgtg

SEQ ID NO: 1742 - DNA, 21 bp, synthetic construct
  source 1..21: mol_type = other DNA
aaaagcgcttcctaaagagga

SEQ ID NO: 1743 - DNA, 21 bp, synthetic construct
  source 1..21: mol_type = other DNA
cctccagggccactttgggaa

SEQ ID NO: 1744 - DNA, 21 bp, synthetic construct
  source 1..21: mol_type = other DNA
ggaaggttgagctctgcaggt

SEQ ID NO: 1745 - DNA, 21 bp, synthetic construct
  source 1..21: mol_type = other DNA
acagccacctgctcccctgta

SEQ ID NO: 1746 - DNA, 21 bp, synthetic construct
  source 1..21: mol_type = other DNA
agatcagctatgtggttacct

SEQ ID NO: 1747 - DNA, 21 bp, synthetic construct
  source 1..21: mol_type = other DNA
ctttttcagatcagctatgtg

SEQ ID NO: 1748 - DNA, 21 bp, synthetic construct
  source 1..21: mol_type = other DNA
tacttcacaatgttctcatga

SEQ ID NO: 1749 - DNA, 21 bp, synthetic construct
  source 1..21: mol_type = other DNA
taaacaggaggaaatggtatt

SEQ ID NO: 1750 - DNA, 21 bp, synthetic construct
  source 1..21: mol_type = other DNA
gaagatattccttaaggcttc

SEQ ID NO: 1751 - DNA, 21 bp, synthetic construct
  source 1..21: mol_type = other DNA
tgccttcgggaagccttaagg

SEQ ID NO: 1752 - DNA, 21 bp, synthetic construct
  source 1..21: mol_type = other DNA
ttcttattctttggaagatat

SEQ ID NO: 1753 - DNA, 21 bp, synthetic construct
  source 1..21: mol_type = other DNA
ttttgttcttattctttggaa

SEQ ID NO: 1754 - DNA, 21 bp, synthetic construct
  source 1..21: mol_type = other DNA
aggtttattttgttcttattc

SEQ ID NO: 1755 - DNA, 21 bp, synthetic construct
  source 1..21: mol_type = other DNA
gctgctgtttgaggtttattt

SEQ ID NO: 1756 - DNA, 21 bp, synthetic construct
  source 1..21: mol_type = other DNA
ccttacaaatctgaacggcat

SEQ ID NO: 1757 - DNA, 21 bp, synthetic construct
  source 1..21: mol_type = other DNA
ttttttaccttacaaatctga

SEQ ID NO: 1758 - DNA, 21 bp, synthetic construct
  source 1..21: mol_type = other DNA
cttctctctctcaggggatgg

SEQ ID NO: 1759 - DNA, 21 bp, synthetic construct
  source 1..21: mol_type = other DNA
ttgctgccaagtcccggtgaa

SEQ ID NO: 1760 - DNA, 21 bp, synthetic construct
  source 1..21: mol_type = other DNA
ggttctcggcaatacgttcac

SEQ ID NO: 1761 - DNA, 21 bp, synthetic construct
  source 1..21: mol_type = other DNA
acttggtgttcactctcaaca

SEQ ID NO: 1762 - DNA, 21 bp, synthetic construct
  source 1..21: mol_type = other DNA
gttaaaccgaagtctccaatt

SEQ ID NO: 1763 - DNA, 21 bp, synthetic construct
  source 1..21: mol_type = other DNA
aattgctttggttaaaccgaa

SEQ ID NO: 1764 - DNA, 21 bp, synthetic construct
  source 1..21: mol_type = other DNA
accaaagcaattgaaaccgat

SEQ ID NO: 1765 - DNA, 21 bp, synthetic construct
  source 1..21: mol_type = other DNA
attcagttaccaaaacacagg

SEQ ID NO: 1766 - DNA, 21 bp, synthetic construct
  source 1..21: mol_type = other DNA
tgttctgcttcctttcaaggt

SEQ ID NO: 1767 - DNA, 21 bp, synthetic construct
  source 1..21: mol_type = other DNA
gattgcattaaacattctgga

SEQ ID NO: 1768 - DNA, 21 bp, synthetic construct
  source 1..21: mol_type = other DNA
aaggtatgctccagaatgttt

SEQ ID NO: 1769 - DNA, 21 bp, synthetic construct
  source 1..21: mol_type = other DNA
atgcaatctaaattttatatt

SEQ ID NO: 1770 - DNA, 21 bp, synthetic construct
  source 1..21: mol_type = other DNA
tattgcctctgacgtctggtc

SEQ ID NO: 1771 - DNA, 21 bp, synthetic construct
  source 1..21: mol_type = other DNA
gagtcactctgcatgagctgc

SEQ ID NO: 1772 - DNA, 21 bp, synthetic construct
  source 1..21: mol_type = other DNA
tttgattttattttatatagt

SEQ ID NO: 1773 - DNA, 21 bp, synthetic construct
  source 1..21: mol_type = other DNA
attttattttatatagttgtt

SEQ ID NO: 1774 - DNA, 21 bp, synthetic construct
  source 1..21: mol_type = other DNA
ttttatatagttgttcctgaa

SEQ ID NO: 1775 - DNA, 21 bp, synthetic construct
  source 1..21: mol_type = other DNA
tatagttgttcctgaaaatga

SEQ ID NO: 1776 - DNA, 21 bp, synthetic construct
  source 1..21: mol_type = other DNA
acgtattcacaagtcttgtga

SEQ ID NO: 1777 - DNA, 21 bp, synthetic construct
  source 1..21: mol_type = other DNA
cttcttttaacgtattcacaa

SEQ ID NO: 1778 - DNA, 21 bp, synthetic construct
  source 1..21: mol_type = other DNA
ctcataagttgataaacctgt

SEQ ID NO: 1779 - DNA, 21 bp, synthetic construct
  source 1..21: mol_type = other DNA
tttttacaggtttatcaactt

SEQ ID NO: 1780 - DNA, 21 bp, synthetic construct
  source 1..21: mol_type = other DNA
caggtttatcaacttatgagg

SEQ ID NO: 1781 - DNA, 21 bp, synthetic construct
  source 1..21: mol_type = other DNA
tcaacttatgaggaaatgctg

SEQ ID NO: 1782 - DNA, 21 bp, synthetic construct
  source 1..21: mol_type = other DNA
aaagtgcttcaaatccttcaa

SEQ ID NO: 1783 - DNA, 21 bp, synthetic construct
  source 1..21: mol_type = other DNA
agaaccttattgaaggatttg

SEQ ID NO: 1784 - DNA, 21 bp, synthetic construct
  source 1..21: mol_type = other DNA
aatgttattcatgcttcttat

SEQ ID NO: 1785 - DNA, 21 bp, synthetic construct
  source 1..21: mol_type = other DNA
tgtcatcgtaaggcaggccat

SEQ ID NO: 1786 - DNA, 21 bp, synthetic construct
  source 1..21: mol_type = other DNA
cagaaatatcaccattctgat

SEQ ID NO: 1787 - DNA, 21 bp, synthetic construct
  source 1..21: mol_type = other DNA
cttcatagaattggcatttcc

SEQ ID NO: 1788 - DNA, 21 bp, synthetic construct
  source 1..21: mol_type = other DNA
tggaaatgccaattctatgaa

SEQ ID NO: 1789 - DNA, 21 bp, synthetic construct
  source 1..21: mol_type = other DNA
ccaagggaatggtaaagatac

SEQ ID NO: 1790 - DNA, 21 bp, synthetic construct
  source 1..21: mol_type = other DNA
ccattcccttgggaaatctga

SEQ ID NO: 1791 - DNA, 21 bp, synthetic construct
  source 1..21: mol_type = other DNA
ttctgcaacatactccccaga

SEQ ID NO: 1792 - DNA, 21 bp, synthetic construct
  source 1..21: mol_type = other DNA
catctggggagtatgttgcag

SEQ ID NO: 1793 - DNA, 21 bp, synthetic construct
  source 1..21: mol_type = other DNA
gaagcagcaatacagatttct

SEQ ID NO: 1794 - DNA, 21 bp, synthetic construct
  source 1..21: mol_type = other DNA
atacttaccacaagctttaga

SEQ ID NO: 1795 - DNA, 21 bp, synthetic construct
  source 1..21: mol_type = other DNA
tctgcttcttttctaggtatc

SEQ ID NO: 1796 - DNA, 21 bp, synthetic construct
  source 1..21: mol_type = other DNA
taggtatcacacctgtgtatc

SEQ ID NO: 1797 - DNA, 21 bp, synthetic construct
  source 1..21: mol_type = other DNA
actcattaaagcaaacatatt

SEQ ID NO: 1798 - DNA, 21 bp, synthetic construct
  source 1..21: mol_type = other DNA
tgtttcactcattaaagcaaa

SEQ ID NO: 1799 - DNA, 21 bp, synthetic construct
  source 1..21: mol_type = other DNA
ctttaatgagtgaaacagaaa

SEQ ID NO: 1800 - DNA, 21 bp, synthetic construct
  source 1..21: mol_type = other DNA
atgagtgaaacagaaaggatc

SEQ ID NO: 1801 - DNA, 21 bp, synthetic construct
  source 1..21: mol_type = other DNA
ctgaagaaagtaccttattct

SEQ ID NO: 1802 - DNA, 21 bp, synthetic construct
  source 1..21: mol_type = other DNA
ttatcttgtagattttacttt

SEQ ID NO: 1803 - DNA, 21 bp, synthetic construct
  source 1..21: mol_type = other DNA
ctttcctcgttggtattgcag

SEQ ID NO: 1804 - DNA, 21 bp, synthetic construct
  source 1..21: mol_type = other DNA
ctcgttggtattgcagtggca

SEQ ID NO: 1805 - DNA, 21 bp, synthetic construct
  source 1..21: mol_type = other DNA
tcatgtcttacctctttgctc

SEQ ID NO: 1806 - DNA, 21 bp, synthetic construct
  source 1..21: mol_type = other DNA
cttcaaatttttggttttagt

SEQ ID NO: 1807 - DNA, 21 bp, synthetic construct
  source 1..21: mol_type = other DNA
tccatccgtgcacaaaatcat

SEQ ID NO: 1808 - DNA, 21 bp, synthetic construct
  source 1..21: mol_type = other DNA
gttttagtggcggcatgattt

SEQ ID NO: 1809 - DNA, 21 bp, synthetic construct
  source 1..21: mol_type = other DNA
gtggcggcatgattttgtgca

SEQ ID NO: 1810 - DNA, 21 bp, synthetic construct
  source 1..21: mol_type = other DNA
atgagtcacaggtacttttat

SEQ ID NO: 1811 - DNA, 21 bp, synthetic construct
  source 1..21: mol_type = other DNA
tgcacggatggataaaagtac

SEQ ID NO: 1812 - DNA, 21 bp, synthetic construct
  source 1..21: mol_type = other DNA
gctattctcatcatatctaac

SEQ ID NO: 1813 - DNA, 21 bp, synthetic construct
  source 1..21: mol_type = other DNA
tttggctattctcatcatatc

SEQ ID NO: 1814 - DNA, 21 bp, synthetic construct
  source 1..21: mol_type = other DNA
atcgttttctttggctattct

SEQ ID NO: 1815 - DNA, 21 bp, synthetic construct
  source 1..21: mol_type = other DNA
caaaagaaaattacctgatag

SEQ ID NO: 1816 - DNA, 21 bp, synthetic construct
  source 1..21: mol_type = other DNA
gtaagaatgtcttgtagctag

SEQ ID NO: 1817 - DNA, 21 bp, synthetic construct
  source 1..21: mol_type = other DNA
tccctagctacaagacattct

SEQ ID NO: 1818 - DNA, 21 bp, synthetic construct
  source 1..21: mol_type = other DNA
ctcgaatacattttggtaaga

SEQ ID NO: 1819 - DNA, 21 bp, synthetic construct
  source 1..21: mol_type = other DNA
acaaggaagcgaataaggtac

SEQ ID NO: 1820 - DNA, 21 bp, synthetic construct
  source 1..21: mol_type = other DNA
cattggctgaattgctgaata

SEQ ID NO: 1821 - DNA, 21 bp, synthetic construct
  source 1..21: mol_type = other DNA
gcagatttattcagcaattca

SEQ ID NO: 1822 - DNA, 21 bp, synthetic construct
  source 1..21: mol_type = other DNA
tggcagtggctttgcattggc

SEQ ID NO: 1823 - DNA, 21 bp, synthetic construct
  source 1..21: mol_type = other DNA
ttcagcaattcagccaatgca

SEQ ID NO: 1824 - DNA, 21 bp, synthetic construct
  source 1..21: mol_type = other DNA
aagtttctggcagtggctttg

SEQ ID NO: 1825 - DNA, 21 bp, synthetic construct
  source 1..21: mol_type = other DNA
taagatacttaagtttcaagt

SEQ ID NO: 1826 - DNA, 21 bp, synthetic construct
  source 1..21: mol_type = other DNA
cagatttataagatacttaag

SEQ ID NO: 1827 - DNA, 21 bp, synthetic construct
  source 1..21: mol_type = other DNA
tctgtgtagaaggcagactgc

SEQ ID NO: 1828 - DNA, 21 bp, synthetic construct
  source 1..21: mol_type = other DNA
cttcaaatttctctgtgtaga

SEQ ID NO: 1829 - DNA, 21 bp, synthetic construct
  source 1..21: mol_type = other DNA
aagtaaaagaacctggaagtg

SEQ ID NO: 1830 - DNA, 21 bp, synthetic construct
  source 1..21: mol_type = other DNA
cagttattataatggttgcaa

SEQ ID NO: 1831 - DNA, 21 bp, synthetic construct
  source 1..21: mol_type = other DNA
caaccattataataactggaa

SEQ ID NO: 1832 - DNA, 21 bp, synthetic construct
  source 1..21: mol_type = other DNA
cctcttgaccactgaattcca

SEQ ID NO: 1833 - DNA, 21 bp, synthetic construct
  source 1..21: mol_type = other DNA
tgtttccctcttgaccactga

SEQ ID NO: 1834 - DNA, 21 bp, synthetic construct
  source 1..21: mol_type = other DNA
tttatgtttccctcttgacca

SEQ ID NO: 1835 - DNA, 21 bp, synthetic construct
  source 1..21: mol_type = other DNA
catgcttttaattataggatt

SEQ ID NO: 1836 - DNA, 21 bp, synthetic construct
  source 1..21: mol_type = other DNA
attataggatttacagttata

SEQ ID NO: 1837 - DNA, 21 bp, synthetic construct
  source 1..21: mol_type = other DNA
cagttatattgcgattttcct

SEQ ID NO: 1838 - DNA, 21 bp, synthetic construct
  source 1..21: mol_type = other DNA
cttgcttaatactgacatcaa

SEQ ID NO: 1839 - DNA, 21 bp, synthetic construct
  source 1..21: mol_type = other DNA
ctaatattattgatgtcagta

SEQ ID NO: 1840 - DNA, 21 bp, synthetic construct
  source 1..21: mol_type = other DNA
aaccctcttggtttgcttgct

SEQ ID NO: 1841 - DNA, 21 bp, synthetic construct
  source 1..21: mol_type = other DNA
atttgaaccctcttggtttgc

SEQ ID NO: 1842 - DNA, 21 bp, synthetic construct
  source 1..21: mol_type = other DNA
ccatcttgcttatggatagtt

SEQ ID NO: 1843 - DNA, 21 bp, synthetic construct
  source 1..21: mol_type = other DNA
tttttcttttctctgcttagg

SEQ ID NO: 1844 - DNA, 21 bp, synthetic construct
  source 1..21: mol_type = other DNA
ttttctctgcttaggaaattg

SEQ ID NO: 1845 - DNA, 21 bp, synthetic construct
  source 1..21: mol_type = other DNA
tctgcttaggaaattgaactt

SEQ ID NO: 1846 - DNA, 21 bp, synthetic construct
  source 1..21: mol_type = other DNA
tctttcgtgtcattaattgat

SEQ ID NO: 1847 - DNA, 21 bp, synthetic construct
  source 1..21: mol_type = other DNA
gtgtcattaattgatggatat

SEQ ID NO: 1848 - DNA, 21 bp, synthetic construct
  source 1..21: mol_type = other DNA
cagaggtaatgatgtgcatct

SEQ ID NO: 1849 - DNA, 21 bp, synthetic construct
  source 1..21: mol_type = other DNA
aagcacggctggaggtgctac

SEQ ID NO: 1850 - DNA, 21 bp, synthetic construct
  source 1..21: mol_type = other DNA
tatattttcaagcacggctgg

SEQ ID NO: 1851 - DNA, 21 bp, synthetic construct
  source 1..21: mol_type = other DNA
agtctgtattactcacgaaat

SEQ ID NO: 1852 - DNA, 21 bp, synthetic construct
  source 1..21: mol_type = other DNA
ctaatggcaaaatccatccta

SEQ ID NO: 1853 - DNA, 21 bp, synthetic construct
  source 1..21: mol_type = other DNA
ttcagtttactaatggcaaaa

SEQ ID NO: 1854 - DNA, 21 bp, synthetic construct
  source 1..21: mol_type = other DNA
cctttaggatggattttgcca

SEQ ID NO: 1855 - DNA, 21 bp, synthetic construct
  source 1..21: mol_type = other DNA
ggatggattttgccattagta

SEQ ID NO: 1856 - DNA, 21 bp, synthetic construct
  source 1..21: mol_type = other DNA
ccattagtaaactgaagaaag

SEQ ID NO: 1857 - DNA, 21 bp, synthetic construct
  source 1..21: mol_type = other DNA
ttaaagtccttaggactgcat

SEQ ID NO: 1858 - DNA, 21 bp, synthetic construct
  source 1..21: mol_type = other DNA
ataaatattttttgacttttg

SEQ ID NO: 1859 - DNA, 21 bp, synthetic construct
  source 1..21: mol_type = other DNA
tattcaatgacattttctcgc

SEQ ID NO: 1860 - DNA, 21 bp, synthetic construct
  source 1..21: mol_type = other DNA
taattaaacttatacagcgag

SEQ ID NO: 1861 - DNA, 21 bp, synthetic construct
  source 1..21: mol_type = other DNA
taatcaaacagtgtttatatt

SEQ ID NO: 1862 - DNA, 21 bp, synthetic construct
  source 1..21: mol_type = other DNA
attacaaaaaatgagaatgaa

SEQ ID NO: 1863 - DNA, 21 bp, synthetic construct
  source 1..21: mol_type = other DNA
tcccactgaggttgtactctt

SEQ ID NO: 1864 - DNA, 21 bp, synthetic construct
  source 1..21: mol_type = other DNA
agactgctgaagttcttcttt

SEQ ID NO: 1865 - DNA, 21 bp, synthetic construct
  source 1..21: mol_type = other DNA
catctggtaacaattcaaaag

SEQ ID NO: 1866 - DNA, 21 bp, synthetic construct
  source 1..21: mol_type = other DNA
aattgttaccagatggaaact

SEQ ID NO: 1867 - DNA, 21 bp, synthetic construct
  source 1..21: mol_type = other DNA
gtaaactggaaaattatattg

SEQ ID NO: 1868 - DNA, 21 bp, synthetic construct
  source 1..21: mol_type = other DNA
ggggacagcatttagtaaact

SEQ ID NO: 1869 - DNA, 21 bp, synthetic construct
  source 1..21: mol_type = other DNA
gctttgggggacagcatttag

SEQ ID NO: 1870 - DNA, 21 bp, synthetic construct
  source 1..21: mol_type = other DNA
cagtttactaaatgctgtccc

SEQ ID NO: 1871 - DNA, 21 bp, synthetic construct
  source 1..21: mol_type = other DNA
ctaaatgctgtcccccaaagc

SEQ ID NO: 1872 - DNA, 21 bp, synthetic construct
  source 1..21: mol_type = other DNA
ttttttcagataaatcaaacc

SEQ ID NO: 1873 - DNA, 21 bp, synthetic construct
  source 1..21: mol_type = other DNA
agataaatcaaaccttctagt

SEQ ID NO: 1874 - DNA, 21 bp, synthetic construct
  source 1..21: mol_type = other DNA
tgatgtaccaacctcaccaac

SEQ ID NO: 1875 - DNA, 21 bp, synthetic construct
  source 1..21: mol_type = other DNA
gttcatatgagtaggcctctg

SEQ ID NO: 1876 - DNA, 21 bp, synthetic construct
  source 1..21: mol_type = other DNA
tgaaacaccatttggttcata

SEQ ID NO: 1877 - DNA, 21 bp, synthetic construct
  source 1..21: mol_type = other DNA
tgattttgtgaaacaccattt

SEQ ID NO: 1878 - DNA, 21 bp, synthetic construct
  source 1..21: mol_type = other DNA
acaaaatcagaaatgaagatt

SEQ ID NO: 1879 - DNA, 21 bp, synthetic construct
  source 1..21: mol_type = other DNA
ttttacctttttctcttgaag

SEQ ID NO: 1880 - DNA, 21 bp, synthetic construct
  source 1..21: mol_type = other DNA
cctttttctcttgaagaatga

SEQ ID NO: 1881 - DNA, 21 bp, synthetic construct
  source 1..21: mol_type = other DNA
taaaagtgccttggccaaggc

SEQ ID NO: 1882 - DNA, 21 bp, synthetic construct
  source 1..21: mol_type = other DNA
tcttgaagaatgaaagccttg

SEQ ID NO: 1883 - DNA, 21 bp, synthetic construct
  source 1..21: mol_type = other DNA
aaaatctttgtaaaagtgcct

SEQ ID NO: 1884 - DNA, 21 bp, synthetic construct
  source 1..21: mol_type = other DNA
caaagatttttaaaggcgtac

SEQ ID NO: 1885 - DNA, 21 bp, synthetic construct
  source 1..21: mol_type = other DNA
aaggcgtacgaagagaagtag

SEQ ID NO: 1886 - DNA, 21 bp, synthetic construct
  source 1..21: mol_type = other DNA
atgcagttgaccgtagtctcc

SEQ ID NO: 1887 - DNA, 21 bp, synthetic construct
  source 1..21: mol_type = other DNA
aaagaacttctgtttcatgca

SEQ ID NO: 1888 - DNA, 21 bp, synthetic construct
  source 1..21: mol_type = other DNA
tccagaacttttaaaagaact

SEQ ID NO: 1889 - DNA, 21 bp, synthetic construct
  source 1..21: mol_type = other DNA
tgtgtgctttatccagaactt

SEQ ID NO: 1890 - DNA, 21 bp, synthetic construct
  source 1..21: mol_type = other DNA
aaagttctggataaagcacac

SEQ ID NO: 1891 - DNA, 21 bp, synthetic construct
  source 1..21: mol_type = other DNA
tacttttttttttccttagtc

SEQ ID NO: 1892 - DNA, 21 bp, synthetic construct
  source 1..21: mol_type = other DNA
cttagtctttctttgaagcag

SEQ ID NO: 1893 - DNA, 21 bp, synthetic construct
  source 1..21: mol_type = other DNA
tttgaagcagcaagtatgatg

SEQ ID NO: 1894 - DNA, 21 bp, synthetic construct
  source 1..21: mol_type = other DNA
aagcagcaagtatgatgagca

SEQ ID NO: 1895 - DNA, 21 bp, synthetic construct
  source 1..21: mol_type = other DNA
aaaccaaatgcttgtgagaaa

SEQ ID NO: 1896 - DNA, 21 bp, synthetic construct
  source 1..21: mol_type = other DNA
tcacaagcatttggttttaaa

SEQ ID NO: 1897 - DNA, 21 bp, synthetic construct
  source 1..21: mol_type = other DNA
gttttaaattatggagtatgt

SEQ ID NO: 1898 - DNA, 21 bp, synthetic construct
  source 1..21: mol_type = other DNA
cttactctcgtctccacagac

SEQ ID NO: 1899 - DNA, 21 bp, synthetic construct
  source 1..21: mol_type = other DNA
aattatggagtatgtgtctgt

SEQ ID NO: 1900 - DNA, 21 bp, synthetic construct
  source 1..21: mol_type = other DNA
caaactcctgaaccagaatat

SEQ ID NO: 1901 - DNA, 21 bp, synthetic construct
  source 1..21: mol_type = other DNA
atgcagatattctggttcagg

SEQ ID NO: 1902 - DNA, 21 bp, synthetic construct
  source 1..21: mol_type = other DNA
agatatgtatctagtgatcca

SEQ ID NO: 1903 - DNA, 21 bp, synthetic construct
  source 1..21: mol_type = other DNA
ttctttttcagatatgtatct

SEQ ID NO: 1904 - DNA, 21 bp, synthetic construct
  source 1..21: mol_type = other DNA
taaaatttggatcactagata

SEQ ID NO: 1905 - DNA, 21 bp, synthetic construct
  source 1..21: mol_type = other DNA
gatcactagatacatatctga

SEQ ID NO: 1906 - DNA, 21 bp, synthetic construct
  source 1..21: mol_type = other DNA
tacaatttttattctttttca

SEQ ID NO: 1907 - DNA, 21 bp, synthetic construct
  source 1..21: mol_type = other DNA
cataatatatttatacaattt

SEQ ID NO: 1908 - DNA, 21 bp, synthetic construct
  source 1..21: mol_type = other DNA
gcaacttcaagtttccataat

SEQ ID NO: 1909 - DNA, 21 bp, synthetic construct
  source 1..21: mol_type = other DNA
actctaataggaagaaaacac

SEQ ID NO: 1910 - DNA, 21 bp, synthetic construct
  source 1..21: mol_type = other DNA
gcacatacattcccatgaata

SEQ ID NO: 1911 - DNA, 21 bp, synthetic construct
  source 1..21: mol_type = other DNA
ctgtcttcctgtcttcttctc

SEQ ID NO: 1912 - DNA, 21 bp, synthetic construct
  source 1..21: mol_type = other DNA
atgaaaggaggatttcctgtc

SEQ ID NO: 1913 - DNA, 21 bp, synthetic construct
  source 1..21: mol_type = other DNA
atcaaacttagtgatcctggc

SEQ ID NO: 1914 - DNA, 21 bp, synthetic construct
  source 1..21: mol_type = other DNA
gcaaaactgtaatactaatgc

SEQ ID NO: 1915 - DNA, 21 bp, synthetic construct
  source 1..21: mol_type = other DNA
aaagttcttcaggagagaata

SEQ ID NO: 1916 - DNA, 21 bp, synthetic construct
  source 1..21: mol_type = other DNA
aatgcattcaggtggtaccca

SEQ ID NO: 1917 - DNA, 21 bp, synthetic construct
  source 1..21: mol_type = other DNA
ggattttcaatgcattcaggt

SEQ ID NO: 1918 - DNA, 21 bp, synthetic construct
  source 1..21: mol_type = other DNA
aatttttaggattttcaatgc

SEQ ID NO: 1919 - DNA, 21 bp, synthetic construct
  source 1..21: mol_type = other DNA
tctgttgccaaatttaaattt

SEQ ID NO: 1920 - DNA, 21 bp, synthetic construct
  source 1..21: mol_type = other DNA
aatttggcaacagacaaatgg

SEQ ID NO: 1921 - DNA, 21 bp, synthetic construct
  source 1..21: mol_type = other DNA
ccacaaagtggtaccaaaact

SEQ ID NO: 1922 - DNA, 21 bp, synthetic construct
  source 1..21: mol_type = other DNA
gcaacagacaaatggagtttt

SEQ ID NO: 1923 - DNA, 21 bp, synthetic construct
  source 1..21: mol_type = other DNA
tctcctccactgcagatttcc

SEQ ID NO: 1924 - DNA, 21 bp, synthetic construct
  source 1..21: mol_type = other DNA
gtaccactttgtgggaaatct

SEQ ID NO: 1925 - DNA, 21 bp, synthetic construct
  source 1..21: mol_type = other DNA
tgggaaatctgcagtggagga

SEQ ID NO: 1926 - DNA, 21 bp, synthetic construct
  source 1..21: mol_type = other DNA
agaatccagagcacttagagg

SEQ ID NO: 1927 - DNA, 21 bp, synthetic construct
  source 1..21: mol_type = other DNA
tggttctttaattatagaagc

SEQ ID NO: 1928 - DNA, 21 bp, synthetic construct
  source 1..21: mol_type = other DNA
attatagaagctacaatttta

SEQ ID NO: 1929 - DNA, 21 bp, synthetic construct
  source 1..21: mol_type = other DNA
gtgcaggaagctgatgcctat

SEQ ID NO: 1930 - DNA, 21 bp, synthetic construct
  source 1..21: mol_type = other DNA
tgaagataggcatcagcttcc

SEQ ID NO: 1931 - DNA, 21 bp, synthetic construct
  source 1..21: mol_type = other DNA
ctaattctgcccactttggtg

SEQ ID NO: 1932 - DNA, 21 bp, synthetic construct
  source 1..21: mol_type = other DNA
taaggtttgctaattctgccc

SEQ ID NO: 1933 - DNA, 21 bp, synthetic construct
  source 1..21: mol_type = other DNA
aggccttctttcagagccatc

SEQ ID NO: 1934 - DNA, 21 bp, synthetic construct
  source 1..21: mol_type = other DNA
agagccatcatacgagatctt

SEQ ID NO: 1935 - DNA, 21 bp, synthetic construct
  source 1..21: mol_type = other DNA
tgttaatagttcataatctgg

SEQ ID NO: 1936 - DNA, 21 bp, synthetic construct
  source 1..21: mol_type = other DNA
tttctccagattatgaactat

SEQ ID NO: 1937 - DNA, 21 bp, synthetic construct
  source 1..21: mol_type = other DNA
tccagattatgaactattaac

SEQ ID NO: 1938 - DNA, 21 bp, synthetic construct
  source 1..21: mol_type = other DNA
gtaacatgtcattttctgtta

SEQ ID NO: 1939 - DNA, 21 bp, synthetic construct
  source 1..21: mol_type = other DNA
tggtgcctttgaagaccggga

SEQ ID NO: 1940 - DNA, 21 bp, synthetic construct
  source 1..21: mol_type = other DNA
aaatgtctctcttcaaactgt

SEQ ID NO: 1941 - DNA, 21 bp, synthetic construct
  source 1..21: mol_type = other DNA
aagaccgggatcctacacagt

SEQ ID NO: 1942 - DNA, 21 bp, synthetic construct
  source 1..21: mol_type = other DNA
aagagagacatttgaaatttc

SEQ ID NO: 1943 - DNA, 21 bp, synthetic construct
  source 1..21: mol_type = other DNA
ccttgccaagttgctgtagaa

SEQ ID NO: 1944 - DNA, 21 bp, synthetic construct
  source 1..21: mol_type = other DNA
aaatttctacagcaacttggc

SEQ ID NO: 1945 - DNA, 21 bp, synthetic construct
  source 1..21: mol_type = other DNA
aaaaaattctgacaatttacc

SEQ ID NO: 1946 - DNA, 21 bp, synthetic construct
  source 1..21: mol_type = other DNA
tacagcaacttggcaaggtaa

SEQ ID NO: 1947 - DNA, 21 bp, synthetic construct
  source 1..21: mol_type = other DNA
gggtaattttgggagtgtgga

SEQ ID NO: 1948 - DNA, 21 bp, synthetic construct
  source 1..21: mol_type = other DNA
ggagtgtggagatgtgccggt

SEQ ID NO: 1949 - DNA, 21 bp, synthetic construct
  source 1..21: mol_type = other DNA
cagcgaccacctccccagtgt

SEQ ID NO: 1950 - DNA, 21 bp, synthetic construct
  source 1..21: mol_type = other DNA
aaagtctcttaggtgctcttc

SEQ ID NO: 1951 - DNA, 21 bp, synthetic construct
  source 1..21: mol_type = other DNA
cctttcaaagtctcttaggtg

SEQ ID NO: 1952 - DNA, 21 bp, synthetic construct
  source 1..21: mol_type = other DNA
aatttccctttcaaagtctct

SEQ ID NO: 1953 - DNA, 21 bp, synthetic construct
  source 1..21: mol_type = other DNA
aggatttcaatttccctttca

SEQ ID NO: 1954 - DNA, 21 bp, synthetic construct
  source 1..21: mol_type = other DNA
aaagggaaattgaaatcctga

SEQ ID NO: 1955 - DNA, 21 bp, synthetic construct
  source 1..21: mol_type = other DNA
caatgttgtcatgctgtaggg

SEQ ID NO: 1956 - DNA, 21 bp, synthetic construct
  source 1..21: mol_type = other DNA
aatgggcagcttaccagcact

SEQ ID NO: 1957 - DNA, 21 bp, synthetic construct
  source 1..21: mol_type = other DNA
cacctttatgttaaaaggtcg

SEQ ID NO: 1958 - DNA, 21 bp, synthetic construct
  source 1..21: mol_type = other DNA
tgttaaaaggtcggcgtaatc

SEQ ID NO: 1959 - DNA, 21 bp, synthetic construct
  source 1..21: mol_type = other DNA
aagatagtctcgtaaacttcc

SEQ ID NO: 1960 - DNA, 21 bp, synthetic construct
  source 1..21: mol_type = other DNA
tgtttttgaagatagtctcgt

SEQ ID NO: 1961 - DNA, 21 bp, synthetic construct
  source 1..21: mol_type = other DNA
ccatatggaagtttacgagac

SEQ ID NO: 1962 - DNA, 21 bp, synthetic construct
  source 1..21: mol_type = other DNA
cgagactatcttcaaaaacat

SEQ ID NO: 1963 - DNA, 21 bp, synthetic construct
  source 1..21: mol_type = other DNA
tgtgatctatccgttctttat

SEQ ID NO: 1964 - DNA, 21 bp, synthetic construct
  source 1..21: mol_type = other DNA
taccaagatactccataccct

SEQ ID NO: 1965 - DNA, 21 bp, synthetic construct
  source 1..21: mol_type = other DNA
tccatagggtatggagtatct

SEQ ID NO: 1966 - DNA, 21 bp, synthetic construct
  source 1..21: mol_type = other DNA
tcgttgccagatccctgtgga

SEQ ID NO: 1967 - DNA, 21 bp, synthetic construct
  source 1..21: mol_type = other DNA
actctgttctcgttctccacc

SEQ ID NO: 1968 - DNA, 21 bp, synthetic construct
  source 1..21: mol_type = other DNA
gttaacccaaaatctccaatt

SEQ ID NO: 1969 - DNA, 21 bp, synthetic construct
  source 1..21: mol_type = other DNA
tcttgtggcaagactttggtt

SEQ ID NO: 1970 - DNA, 21 bp, synthetic construct
  source 1..21: mol_type = other DNA
tagtattctttgtcttgtggc

SEQ ID NO: 1971 - DNA, 21 bp, synthetic construct
  source 1..21: mol_type = other DNA
ggttaaccaaagtcttgccac

SEQ ID NO: 1972 - DNA, 21 bp, synthetic construct
  source 1..21: mol_type = other DNA
ctttatagtattctttgtctt

SEQ ID NO: 1973 - DNA, 21 bp, synthetic construct
  source 1..21: mol_type = other DNA
accaggttcttttactttata

SEQ ID NO: 1974 - DNA, 21 bp, synthetic construct
  source 1..21: mol_type = other DNA
tcatactgaaatatactcacc

SEQ ID NO: 1975 - DNA, 21 bp, synthetic construct
  source 1..21: mol_type = other DNA
caggtatgctccagaatcact

SEQ ID NO: 1976 - DNA, 21 bp, synthetic construct
  source 1..21: mol_type = other DNA
tgtggcctcagatgtttggag

SEQ ID NO: 1977 - DNA, 21 bp, synthetic construct
  source 1..21: mol_type = other DNA
gagctttggagtggttctgta

SEQ ID NO: 1978 - DNA, 21 bp, synthetic construct
  source 1..21: mol_type = other DNA
gagtggttctgtatgaacttt

SEQ ID NO: 1979 - DNA, 21 bp, synthetic construct
  source 1..21: mol_type = other DNA
ctcttctcaatgtatgtgaaa

SEQ ID NO: 1980 - DNA, 21 bp, synthetic construct
  source 1..21: mol_type = other DNA
acatacattgagaagagtaaa

SEQ ID NO: 1981 - DNA, 21 bp, synthetic construct
  source 1..21: mol_type = other DNA
tcattgccaatcatacgcata

SEQ ID NO: 1982 - DNA, 21 bp, synthetic construct
  source 1..21: mol_type = other DNA
ttttaggaatttatgcgtatg

SEQ ID NO: 1983 - DNA, 21 bp, synthetic construct
  source 1..21: mol_type = other DNA
ggaatttatgcgtatgattgg

SEQ ID NO: 1984 - DNA, 21 bp, synthetic construct
  source 1..21: mol_type = other DNA
tgcgtatgattggcaatgaca

SEQ ID NO: 1985 - DNA, 21 bp, synthetic construct
  source 1..21: mol_type = other DNA
atagaacttttgaagaataat

SEQ ID NO: 1986 - DNA, 21 bp, synthetic construct
  source 1..21: mol_type = other DNA
aagaataatggaagattacca

SEQ ID NO: 1987 - DNA, 21 bp, synthetic construct
  source 1..21: mol_type = other DNA
gtttattttctcctttacaga

SEQ ID NO: 1988 - DNA, 21 bp, synthetic construct
  source 1..21: mol_type = other DNA
ttttctcctttacagatctat

SEQ ID NO: 1989 - DNA, 21 bp, synthetic construct
  source 1..21: mol_type = other DNA
tcctttacagatctatatgat

SEQ ID NO: 1990 - DNA, 21 bp, synthetic construct
  source 1..21: mol_type = other DNA
cagatctatatgatcatgaca

SEQ ID NO: 1991 - DNA, 21 bp, synthetic construct
  source 1..21: mol_type = other DNA
cattattgttccagcattctg

SEQ ID NO: 1992 - DNA, 21 bp, synthetic construct
  source 1..21: mol_type = other DNA
atccactcgaagagctagatc

SEQ ID NO: 1993 - DNA, 21 bp, synthetic construct
  source 1..21: mol_type = other DNA
gggatctagctcttcgagtgg

SEQ ID NO: 1994 - DNA, 21 bp, synthetic construct
  source 1..21: mol_type = other DNA
atccagccatgttatccctta

SEQ ID NO: 1995 - DNA, 21 bp, synthetic construct
  source 1..21: mol_type = other DNA
tttcatccagccatgttatcc

SEQ ID NO: 1996 - DNA, 21 bp, synthetic construct
  source 1..21: mol_type = other DNA
gagtctctcagctggtacacg

SEQ ID NO: 1997 - DNA, 21 bp, synthetic construct
  source 1..21: mol_type = other DNA
tctgtgatatacacatcagaa

SEQ ID NO: 1998 - DNA, 21 bp, synthetic construct
  source 1..21: mol_type = other DNA
ttgctccaggccacagcactg

SEQ ID NO: 1999 - DNA, 21 bp, synthetic construct
  source 1..21: mol_type = other DNA
ggtgtgggagatctctgcttc

SEQ ID NO: 2000 - DNA, 21 bp, synthetic construct
  source 1..21: mol_type = other DNA
agccatcagaagcagagatct

SEQ ID NO: 2001 - DNA, 21 bp, synthetic construct
  source 1..21: mol_type = other DNA
agatccaggatactgagggca

SEQ ID NO: 2002 - DNA, 21 bp, synthetic construct
  source 1..21: mol_type = other DNA
cttcctctggggtagcagaca

SEQ ID NO: 2003 - DNA, 21 bp, synthetic construct
  source 1..21: mol_type = other DNA
ccctccttcctccgcaggaca

SEQ ID NO: 2004 - DNA, 21 bp, synthetic construct
  source 1..21: mol_type = other DNA
ccctttagtgagccccttcaa

SEQ ID NO: 2005 - DNA, 21 bp, synthetic construct
  source 1..21: mol_type = other DNA
gtgagccccttcaagatacct

SEQ ID NO: 2006 - DNA, 21 bp, synthetic construct
  source 1..21: mol_type = other DNA
ccaggtccagtcttgtaatgt

SEQ ID NO: 2007 - DNA, 21 bp, synthetic construct
  source 1..21: mol_type = other DNA
ccggaggacagagactgacat

SEQ ID NO: 2008 - DNA, 21 bp, synthetic construct
  source 1..21: mol_type = other DNA
caggtactttggcccagtcaa

SEQ ID NO: 2009 - DNA, 21 bp, synthetic construct
  source 1..21: mol_type = other DNA
tgagggaaaggacaagatgaa

SEQ ID NO: 2010 - DNA, 21 bp, synthetic construct
  source 1..21: mol_type = other DNA
accgcggccatcctgcaggca

SEQ ID NO: 2011 - DNA, 21 bp, synthetic construct
  source 1..21: mol_type = other DNA
ggatccagcaggccaaagctc

SEQ ID NO: 2012 - DNA, 21 bp, synthetic construct
  source 1..21: mol_type = other DNA
agtgggggtgaattcagtgta

SEQ ID NO: 2013 - DNA, 21 bp, synthetic construct
  source 1..21: mol_type = other DNA
ctcacgtcatccagcagagaa

SEQ ID NO: 2014 - DNA, 21 bp, synthetic construct
  source 1..21: mol_type = other DNA
gggaaggctggcatgggcaag

SEQ ID NO: 2015 - DNA, 21 bp, synthetic construct
  source 1..21: mol_type = other DNA
gggccactcacagcctgctga

SEQ ID NO: 2016 - DNA, 21 bp, synthetic construct
  source 1..21: mol_type = other DNA
atggctgtcccctggagcccc

SEQ ID NO: 2017 - DNA, 21 bp, synthetic construct
  source 1..21: mol_type = other DNA
gcagcacgtggtacaggagct

SEQ ID NO: 2018 - DNA, 21 bp, synthetic construct
  source 1..21: mol_type = other DNA
caaggacttcagctgggggaa

SEQ ID NO: 2019 - DNA, 21 bp, synthetic construct
  source 1..21: mol_type = other DNA
tgggctcaggtgcttcctcac

SEQ ID NO: 2020 - DNA, 1000 bp, Homo sapiens
  source 1..1000: mol_type = genomic DNA
gcctcccaaagtgctgagattatgggcatgagccaccgcacctggccctgacaagaacctttgagttaggtataatggttcaccccaatttatagataatgaacccaagtcacaggggaagtgaagtcagttgcctaaggtcagacagcagtaaatggttctctgaccctaactccactgcctccctctcataaaaacactgggtggttacagtgggcccacctggagaagtcaagctattctctccatctcaagaacattaatttaatcatcctttttaccatataagataacatcttcacaggttctgaggatgagaatgttgacatctttgggtggtcgttattcagcctatcacaggtatccagggaagaaaaaaggaatttccaaaaagagaaaatacgaacattgggaaggctaattacagatggtgactactgaagggttagtcagaagcataatggaggcagtgatgagatgacagcacagatgcatgactctagtcccagcaactcctaaaaggtaaagaaatgtatcctgccaccctcagcttctttggggtgtcctcataaaagagaggcagtaaagcagaatcagagtcagatagagaggttgtaagaagagaagcagaggtgagtaagctgtgtttcaaacccagagtcaaggctcttgcccctctgcggtgctgccgaagcccagggtgggtggggactgacatgcaactcaggtactgtgtggcagactttgtgccttggcatgaaactatgcctgcccacaggaaggggcaccattttctcattagctcaaagagacttctgctggccaattcctgtcttctcaatactgcagctctccagagacaacactgttctctattctcctgtaagtgaggcagagcctggcagtaccctctatgccacctctcactagtacaggttagcactcagggtggcccactggtgtgtgtctcagctgctggtgtgcgtgctggtgcaggtac

SEQ ID NO: 2021 - DNA, 1000 bp, Homo sapiens
  source 1..1000: mol_type = genomic DNA
tgggctgagggttgtggctggatctctttgcattgccacatccacaacagaattttgagaagtccgagaattctaaattggagcctgaccttcttcataatagtatatttgtcaaggtaggaggataaaacattttattgaacagtttgctaagctgatttaaaattttccagcatttagctatatggtatatggacctccacatgtatgatttcatttatattaaatgtccagaatagacaaatctataatgacaataaagagattagtagttgccagaggctgggaggaggggagaaacaatgagtgattgcggacgggtgtggggtttctttctggggcgataacagtgtcctggaattcaatagtgataatggatgcacactgtgaatatactaaaagccactcacactttaaaagtgtgggttttatggtaatttgaatgatatatcaagctatcaccaaaaatacacaatgggagttcagaaatgccaccccaaactatgatgatttgacatgctcattactttgaactgatgtcacttggggaaaaacagatgcaggcagagactttctctgagatctgcttatctgcctaagacagatcaagggatcctccaaaaggaactcaattgtcatgaatcccctcccctggaaccttatcaaccagggacaatgaacttagatcagagagggggagactggaggttgacatcatgcctagacagccacctcttcttctgagggctgctccaagagaacctttattacttgagaggcttctcatttgcataacaagaaacctttgttcaccatacacttcctcccctcatattctcataactggtgtcaccaccacccacgcagaagtccaaagcctctattcccttctgtacctcagggtgctatataagcttcaatcatctgacccttctttgaatctcatattttgtgggcttgcatgggtatgtacataattaaaaatggatttcctcttgtt

SEQ ID NO: 2022 - DNA, 1000 bp, Homo sapiens
  source 1..1000: mol_type = genomic DNA
atttacacacatgccacagacagaaacattttaatagacctttgcttatggaaaagtaaagcaaaaatgtaattctagaagggagaaattttagtcaattagaaaataagatggtcaggcattgtagctctcatgtgtaatcccagtgctttggaaggttgaggcgagaggattgcttgagaccaggagtttgcgaccagcctagacaacatagctggtcatataaaaaaacttcaaaaaaattagctagctgtagagctttctgcctatatttccagctactcaaggatgaggcaaaagaatcccttaagcccaggaggttgaggttgcagtgaactgtaattgcaccaccacactctagcctgggtaacagagcaaggtcccatctcctaaaaaaaaaagaaaggaaaataaaaagaaaataaactattctccataataatgtagacagcaatcctcactgtgaaccagaaggaacctcggcaaattttttagacatcaatgggatttcactatcagctgagagtgttccctttttagcatggcaagctgtttcctgaagcaatagagagaagcaagaccaaggaaaaatctagaaagagcctctctgtagaaaagcagagcaatgatctctaatcacaatgctatcaaatattccaggctaaattttcctttatagcattaaaattttcctcacatccacaagattccaatagttttcttaatgccatagcctggtgtctattctgccttgtggattcccataatgcaaaatgccattaaaaaaggaacagaccatgagaagtgggcctccgaagcacatgaagcttggtatcatcagaaagataaggggcaacagtcaggaataattgttgggacatttaataagtccctggaaattcctagaaacataatttttttttgagtctaagatgctatcattttaaggtgcaccattattttatttgctacaatgtagaaaacaataacactgccaatt

SEQ ID NO: 2023 - DNA, 1000 bp, Homo sapiens
  source 1..1000: mol_type = genomic DNA
tgattaggtaaaatatcagagacacaaatcaggttaaattgattttttattgtaattacatttaaaattttagaattcatcagtaggtatgaacaaacatatacatacatatatataatttatattataagtttattatttatactatacattataaaaataactgagagataaactttcgtttatccttaatgctaaaataattcatttaccttggagagatcagaactctgtccatttcccctacataaaaactagagagtactattgctttctctttctcgggcttactctggtctcatagaatatgcattttcattttttttcaacagaatatccgtggatagctaaaatttctgcttcctttgtcaacatttgtatttccccagtggacatttctgcaaaatttattttcatttctttgttaccagagaaactctgttggtcaagttcaatagcatcctcagcataatttcagaaggaaattacagggagcaattgaagtccatcactttcttggaggggaaatattaacaccctcacctcttgctcccaatattaggtggtaggcaggagtgagttactcattttctgaaggagcagtaactctttggacccctcgagtcacttggtaaataaactctagcactgccccgaagagtgcctcagagatttcaaggaataaatgctttaaaggtaggaaaatgctaagaaacaccatcatataagtgagttatttccaattttattttaaatacagccatatattattacatacagccacacattattaaataatgtattaatacattattattaaatacagccatatatatgtatatatgtgtgtgtgtatatatatacatatatatgtaagtatgtagctgctataccctcctgaagcaatgaatgtagctgctataccctccagaagcaatgataccctccagaggtgataacagatacaagtaacaaccacactctctggttttgacaacca

SEQ ID NO: 2024 - DNA, 1000 bp, Homo sapiens
  source 1..1000: mol_type = genomic DNA
cagagagcttccaaggcattatcccatccaaagggtaaagaggctgggatatttatcgactagctcccattcttcactggctgtaacttgtccacgtctcacagctgtaactcccttgtattccctacctatctggtgtgaggaccaagcttgtgtctgtggatagagaaagccctaaagcagaaagtctaggtgcttgcacaaaaagatcatctgcacagaatgatgatcaagagatgtgagtggggcaccacaacatttacctcaggaatctctgttcaggactcagctttggtctcaaaccttgggaagcttatacactgaggcagtgttaggatctcttttctctgccttcctgtgcttttaagtgtatttcactgtttttgatcccttgtctgccccttatatttgactatcaggctcttgaaggtctattacacttactcattgtttttaccccctgttcctatctcagtgcccaacacagagctgacagttaatatatgttggttggatgcatgtgtgggtatcttatctttttatcctttaaaagacctcacacgtagatgaaaattttaaaatcattaattcaatcatcaattcaattcaatcatctttttatcctttaaaagacctcacacattgatgaaaattttaaaatcattaattcaattgaagaggccttgtgattgacatgagtataaattggaccattattaacttcaaactaattctactatgccagaaaccatgcctgaagtattaaaacatcacgttaaaaaacaaaagacaaaaaaaaaacttatctaaaaaattacattaaataaaatagaccaaaggtaaatcttactcaagttttcaggaaaaaaaaattgttttctatactcttttctcacctattcttccttgtcacagagaagcaattattatattagactttcctttttcaatgtgtagatgacatcatatgatttaaattttttatgtatttctcttgcaa

SEQ ID NO: 2025 - DNA, 1000 bp, Homo sapiens
  source 1..1000: mol_type = genomic DNA
atcagcagcagaggctgcagaacagcggatattagtgaaaagcaaatgttgctgtctgatcgttcctgtggaagttttgtctcagaggagtacccggccgtgtgaggtgtcagtctgcccctactcgggggtgcctcccagttaggctactcaggggtcagggacccacttgaggaggcagtctgtctgttctcagatctcaagctgtgtgctgggagaaccactactctcttcaaagctgtcagacagggacatttaagtctgcagaggtttctgctgccttttgttgggctatgccctgcccccagaggtggagtctacagagacaggcaggccttgagctgcagtgggctccacccagttcgagcttcctggctgctttgtttacctacaatggtgggctcccctcccccagccttgctgctgccttgcagtttgatctcagactgctgtgctagcaatgagcgaggctccatgggcgtaggaccctccgagccaggtgggatacaatcttctagtttgctgtttgctaggaccattggaaaagcacagtattagggtgggagtgacccgattttccaggtgctgtctgtcacccctttccttggctaggaaagggaattccctgaccccttgcgcttcctgggtgaggtgatgccttgccctgcttcggctcatgctcagtgcactgcacccactgtcttgcacccactgtccgacaatccccagtgtgatgaacccggtacctcagttggaaatgcagaaatcattcatcttctgagtcactcacgctgggagctgtagactggagctgttcctattcggccatctacatgttctttcttccctcatcatcacttctttacttcttttatttcacttctggctttctgtcctcccacgctgaggaagactgatttggtggacatgtatttattctgctgagtaccagttgatgtggaagtagttgttttatagtcaacatgtttttatgactaat

SEQ ID NO: 2026 - DNA, 1000 bp, Homo sapiens
  source 1..1000: mol_type = genomic DNA
gagtgatgtctaatcacaatctgtgataggtatttgctttaaggtgcatctaataacatgacagtgattttcatctcatataaccttcattaactctggttccctgctaagataaagccttccctataagccaactgagaatactgtagtcagaatttacaggtacttcccattgtggttgttcaccttatttgtgccagtttttcttcttctttattcataccttttgccatgtgaatttgcatttcttctgggttggagtcaagtatatatttatcctttttacctttgactctgaggctggccaaaggaataaggtggatgtgacaaggtacaatttctgagcctagcccttagaggccttccatgtttccacttgttctcttgcacttgcgacgttgctgtcaaaagaacatgcaatggctagctagcagcctgtgcacctgcagtgagaaccagagccacccagttgctgcagcctgagaccaagctgctcagctaagcatagcttagatcaccattgagttctgaggtggtttgtcatacagcaatggcaatcagatatatccacacaaatataattttagtttatatttttgttactgcagttctcatcttattctgaggatacgtgacaaaataattctttcaaaaatattgatgctgtgccagattactattttgaatgaattattagacaaatacttcatatgtatcttattatgtgggtttacacattatttatcttattgatttaacttcaaaactaaactttagtttagctcttgggccctatctgggaaagggtcatcttttaatcaccattaaatcactgaagtcatcagtttattcaaagtactctgcacaaaattagcattctttagtggttgtgaaataaatagactttaaacttatcattaatattcccaatggtactatgggggaggcaaaattttctatcttcttagtggtttttttttttttggctagggctaaggat

SEQ ID NO: 2027 - DNA, 1000 bp, Homo sapiens
  source 1..1000: mol_type = genomic DNA
acgcacctgagaaatgtgttaaggattaagatgctagtgctagatgtttgattttctgaatcgaaccactattggtgagatccagaagctcaaagacatgatatacccaccttcaaataatgtttatgtaggtaatctattctcaggatttatagacactgctgttaagacctattgtcattggggtaaaaaaaaatccttattatattatacaaattattatatactattatattatagaaattatatttctattaaatagcttgtgtagaaagtaaccatatatagttagaaaaacactgatctcaagaacaggattttagatttgactctgacaatttctgttcggtcttgtataaatgtatcaatttagatttagggctttattttctaatccataaaatgtgtagcatacttctgctagctatacatttactgaagttattattttaaactatttttattttcatttttttgttttgagttataatcataattaatggattcaagtgacagagaaaagaaagtaattagtcatcttttttcagaatacagtctttgttctgaaggtatttcgtatgaatcaagtttcaaatcttcagataaattttcaccttgccaatgtgctttctgctctaaatcattcctgaattttgctatgatttttctttcttataaaatcttgacactaaattgtcaggagatatacatatatgtatatatgtaaaatatatatatcatatataaatatatataaattttgagttaaagtactattacagtattcaattctaccagtaattctaatagtatgaaaataaagtcaccagttgaagtaagacctactgacaccttctattatatttcgataattctatttgaaactaattatatagtaggacattttcattgttttcagtattaactggcactcatgtagatattgcaggccaaattttacctctaccttttggaattttctggggtagacttgagaatt

SEQ ID NO: 2028 - DNA, 1000 bp, Homo sapiens
  source 1..1000: mol_type = genomic DNA
tacatgtgtaaacagttttagcgtagatttcctcgcacttttaaattttggattcttaatttccctgtcccccctgccccccccccaaaaaaaacctgctaacgtttaaacgaacacagtttgggaaatctgcgttaagtccttcgtgggagtggggttgctcagctcacagtaggccacgaacctgaattttctcttgtctgctgcccccttttgatagatggagggaagagcaggcttccagtgcaatggacagaagagggagcctgcaagttggtaacagagtctattagggaaagagagagtcacttgaatcctcagagctgctcctgtcaactgctttgtgcagtttttgtgacttattagctgcttgtttgcactctatctacgcctgcccaggtgtgtttgggccctagagcgaagggagcacaggcgttcatttagaaacttatccctccgtccaaatattggatgcttaccatgtgcctggtgcaatgcagggtgatacaaagaggaagataagtgaggcattcttatcgaaggaccagacactcttccagcctgactatattcattacactcgtgcctgacctttctttgactctaagattcttcctttctaaatgtgaatcttaaagactgaagtctttgatctaagactgctttcttatcacatcacatccaacaaccaacttttcacagcttcccagatcccaaattctgtttagcaaggacacttggatttttttgttttttgttataaatgacctcttcaggttcatattttcactatgtccagaattcttattttattctgttttgtgctgacattggaggcagagtctgtgtcacagaatacaccactaggggttaccctggacatggaagggtattcactcggggaagaaattttaatggaatttttaatatctagagctgtcattatcctgtgatggttcacaagaaatggaacacttaaaaatttctacagaaaaaaagg

SEQ ID NO: 2029 - DNA, 1000 bp, Homo sapiens
  source 1..1000: mol_type = genomic DNA
gccacaaatttgttttctgtatctgtagatttgcatttttttccgaacatctcatatgaatagaatcacaaaatttgtgtattttgtgccaaacttctttcacttagcatactgatttcaaaattgatccaacttatagcatatatcagtactttattcctttttagggcaaagaaatcttccattacacggataccccacattttatttctctacccatcgcttgctgggcatgagttgtttgtgacaaatattcatatacatattcttgtgtggacatatgttttcgcttctcttgggtatatatctaggagtaggattgctgggtcatatggtaagtctctatttaatggtttagactcagtactttgttttctgcctttccacagctcagtttcataaagaggcaggagccttttgttcagggctccttggcagtaaggtaatttcttcttctgcattgtatccagctgacccttgctcagtgctgttctttgggggaaagatggaatgctgggaagccagcacctcttattccttctagctaacacttttacagtgacggatataatagatatcttcaactagtattgttgaattatctccctgatgctgtccaattttgcttcatatattttggggctctgttattaggtatgcatatatagtcattattgttatatctttgtggtggtgtggcctttttattattttagcacttttatatctttacctctaataacgtttttaaaaattgaacgttgattttgtctgatgttagtacaaccacttcagcttctttgtagttgctgtttgcatgacatatctttctccattcttttactttcaatctatttgtatctctgggtctaaaatgtgtagatagcacatagttgaatcttttaaaaaatacattttacaatctctgatttttattggaatgtttaatccatccacatttaatgttacgattgatggagctggacttatttctgccata

SEQ ID NO: 2030 - DNA, 1000 bp, Homo sapiens
  source 1..1000: mol_type = genomic DNA
aacacagagctaaaaccaagtaagaggcgattctccaaaagcacttcctcagcaaacagcatatctattgtgtgtgggttctttaattggctgagaactgaatttcacctttggcattaaagagaagtgtttatttttactgtcttcactgttttaatgtttaaacaaaatctaaatactgaggtgaactctatcataaaacaagtgaaacggcaacataggttgatccagaaagaagcaaattccagcatggcgggcactacatgtttcagctcatcagttatctgaatcttatggctctaaagatggatggatgagaatacataggcagaagcttcctggtgaggctggtatgattctgttgtcctatcttcaacactatccttctaccttcagggttgctgttgtaggttttatttctttggcttctgttgccagtaatggaaaaggaccacatggaagactgtatttatgtacatcatgtccaaacagaatatcctataatagtgaatcttggaagaaagcttgagagatgtggcccagcgcggtggctcacacctgtaatcccagcactttgggagactgaggtgggctgatcacgaggtcaggagttcgagaccagtgtgaccaacatggtgaaaccccatctctactaaaaagacaaaaattagccgggcctggtggtgttgcacccgtaatcccagctacccaggaggctgaggcaggagaattgcttgaacccaggaggcagaggttgcagtgagccaagatcgtaccactgcactccagccctccagcctggacaacagagcaagactctgtctcaaaagaaaaaaaaaataccagtttgagagatgtatgtgaggactgattaccgaaagcgaaagggtttagtacatctcatgagaacagagcagtcacaagtgatataaaccaaactcccttggaaatttgtaatctatcaacttctttatttaaagagaataggaggtttactgtg

SEQ ID NO: 2031 - DNA, 1000 bp, Homo sapiens
  source 1..1000: mol_type = genomic DNA
actcccactcctactaattacagcttgtgtgtccttcagtcattcacttcccttcacatgaccagcccagcagaaatgaactaccaggaacatgagctcagagcgatgggctggccacctgccaagcacctctgaatggaaagagcagaattttgcattgcctgccatgccacgtggagcaggccctgggtggctctttaggggatgggtgtggactcccacaacaaaaccaagggccatattcaaagttaaaagctctgccatagatggtatttgttgaggctgtgtgtggtagctcatgcatgtatgcccaacactttaggaggctgaggtgggaagatcacttgaggctgggagttcaagtctagcctaggcaagatagtgagatcccttctctaaaaaagataaaatattaactgggcatcatggacgtgcctgtagccccagctactggggaggctgaggcaggaggatggcttgagtccaggagtttgagactgcagtgagctgtgattgcaccattgctccctagcccgggtgacagaacaagacttttatttctttaaaaaaaaaaaaaaaaaagaaggtgtttactgcagttgctttattaaaaaaaaagtaaatgaatgttctgactgttctacttttgaaaataagtggcaaggaattagaactgtatctttcagcaacaaaatgtacactgtggttccatgtcacagccaggaatggagtcagatgtctcagaccagaatcacagctctgccacctcctgtgacatggacttgctaagctaccttgactctctggagctcactatgcccatcaataacaagaaataaataaatccgtcctgtaaggttgtcaggagaaacaaatgaggcactatatgtggaagttcctggaatagtgaccagcacagaggacgtctcaaagaaagatttgctgaaccccaaaagacaggaggactggaggaacaacaaagagacaggaaagctagcat

SEQ ID NO: 2032 - DNA, 1000 bp, Homo sapiens
  source 1..1000: mol_type = genomic DNA
aattcatagcccagccaaggaacttagaagagtagagggaagtcatttttcactcccctacaagaacattctgctgtaaagaggagctagaaataatttttgttttaaattcaaccaaacatagggataattctgaaatttggaaccaaaagaattataagtacactactggtgaatttgtgcttatctgaaatctacacatgtagctgtctttatgtatctctgtatatcgatgtttttctatatatataatcagtgaagtaagatatctagtcattcatttactcaccaagtgattgcagtggggtgacagggacagtggggggtgtggtggcgggttgccagagcatgaggagtatgcaatagaatctaagaaatcatacctacctggccaggcacagttgctcatgcctgtaatcccagcactttgggaggcagaggcaggcggatcacttgaggtcaggagttccagaccagcctggccaacatggtgaaatcccatctctactaaaaatacaaaaaatacaaaaaattagctgggtgtggtggcacatgcctgtaatcctggctactctggaggctgaggcaggagaatggcttgaacctgggaggcagaggctgcagtgagctgaaattgtactactgcactccagcctgggtgacagagtgagactccatctcaaaaaaaaaaaaaaaaaaaaaaaatcagacctgccttccatgagctcatggtatacttgaatctccataggctagttattcaggagggtatgtaatgtaactcaacaatgcacaattacttaaattcgctcaggagaattacctcattttgcccaacttgttactgtgaaaaaaaaaaaagaaagaaaatttcaggaccttccaaatttattatgccaaagggaaaagtcaagccctggaaaccaagtcatgtaacacggctgtttttcttctctggtgcatgactgttgcttcctgatctttttgttgatgttataca

SEQ ID NO: 2033 - DNA, 1000 bp, Homo sapiens
  source 1..1000: mol_type = genomic DNA
catataaattaaatatttatgttatattgaaggaatacttttagacttgtttaaacacaaatctttaaaaattacatatcactcttgcatgtacataaaaaatgaaaatataggcaattaaattaagagaggtctacagtgtctttacatcaagtctgactctactgagtccctttttgactcagagtcattaatatattgtttttttccagtaataatgtagtgatgcagcctgtcttcaaagactgctctactattgactcagattttctcccaagccattgatactagttttgaagctgatgctttttaaatcttgctgtcagacttacgggaaggttttcatacaacagggctcatattctttcctcaaattatccttacatgtaaatgttcagaatgtcgagatgatacataggccagttatgccactgtgaatatctaccaaggtcacatgtgtaatgaacaaagacagctatttctgctgctggctggcagtgatttgcaagattttgttgactgtaggacatatcctacttcaatgatgttaaaatgtgaacaaatatgcacttcagactttgtaaaatgtagcacagcacttacagagcacactaggcttctggcactcgcataaaatgaagacttggagttttagctgagtactaaaggaggaccatcctcccaccgaaggatgaagaatttaaggatatgtaagttgagctgtacttatgttcatctgtgatttttacaagtcacttattgctacatgtatcctttaaatatgcgttgtccttcctcctaaaatggtttcaccataataagtgaaatgtcagcttgtcacattaaattataaattataaattaccatcaccttagtcctctacatatccttcaacttcattatgacactgtccttcagagataaggaacagaaaggctttaatgaaaacttcagctaatgtaataattagggaaggatgagctaattaagaaacataca

SEQ ID NO: 2034 - DNA, 1000 bp, Homo sapiens
  source 1..1000: mol_type = genomic DNA
caaagtctccctagagggcaaaattgtccccattgaagaccactgggttagatagaaacttacatctcacacatggagagtccaggctggcatggtcgctctgctgtgcactgggagcccaggttcctcctcgctttgcaaattgtacaagctgccctcatcacctggatgcctacatctcacttaagagtctcagttctaggagggcacagacaatggtgtactggtaaacagactctgttaaaaaaaaaaaaaaaaaaaaccaacacaatcaggaacattttttaaaagcccagatttgtagtgtttgcagattcttatgttttaaatactcctgccatggctgatgtgaaactaccaacagtttaacaactggcttactaaatttctgaatatttaccatttgtcccttgtaagacagtattagtgggctgcagtatatcaacagagaaagggaaggaaaagatacaaccttttgttgaaggacaaaatgacatttcacttttcttcagccccactggccaaaacttagtcccatgttcaccttagctgcaggggaggctgaaatgcagtgtttattctaaacaaccatgtatccagccacaataccaggggaatttatcaccaagagaaagagagagagaatatctagtgcttgaaaattatcagtctctgccacaattttatttaaaaaataaccagaaaaatgagagtgaattttatctgagaggatcttagaaatctcagcatcgagaaggtaataaataaagagagataagtcacagacttcctgcgacagtcaagaattccccatgcagatgacaccccaggagatgccgggtgattgttcttacaatttcttcagttgaaggtaaatgtggcactagccatttattcttttagctcacgttgtttgaagtgcatcgcctatgtacttcaccctttggactcactagaaaacaaagagaattttggaattagaagaggcttaataatgtta

SEQ ID NO: 2035 - DNA, 1000 bp, Homo sapiens
  source 1..1000: mol_type = genomic DNA
aaatataaataaaacatttcttttggaaattttataattcaagctaatttaaaattatgtaaacctctatctttcatgtaatcttcttccttcttttaaaacaacatttttttggtggtcatctgttcgggagaaaatgaaattttctgtggataagcagatattcttcacggagaaagctaacattctgcattcctctattttaaaagtggaaaacatagtcctgttatttgtatttagatgtatttctcaccaaagagtgccaggctggattacagaagatctatattctgatcttgtcctttttctttgcaagcctgaggaattgtccagacacagaattccctagatccccagatttctcacctataatatgaagggttgaaagagaggtctcaatcggctttgaattttctgttctatacttctgcaccaccactgtagcactgacaattgcatgaaaatattaagctctattatgttttcagtactatccttagcttctttaaaaaattagtctagctgtgtttgtaaataaatgatgtcactggaaaaatggtttcataccattgttgtcaatagttgaatgtggcttgccctcaggaacaatgcattcttcaataatatggaggatggaaggtgtataaggactcagatagctattattctcatttgcccatgatcctttcatatccccgcctctggtttagcattctctttcttccaggggaatttctcccccattccatgcattctagtagaattttttatcacagtagattgtcctgccctgccacagaaatgggcatttgacacagtggccacaaagattggtctaagcagtaggcctgtgacccaaggtaggccaattagagttttctgtagaattttttagattcaaagtgtatgtgtgtgggggggatgactcttcttgaattttatattaggatgcatgccagaaattgttgaaaggtctttaatgtaccatgtacaggaagct

SEQ ID NO: 2036 - DNA, 1000 bp, Homo sapiens
  source 1..1000: mol_type = genomic DNA
cacctataagaggaaatatacttatgtctaggtggactccaatgtgtctgtttactgatacttatttattcattattttcaagtaaaatgtagaagtgaataacttaagagaataactatttttatgagagaaaaatacccactttcttttttattactttgttcctctagaggttcatgaataatatattgaacatgtgaggagtgaggcctgtctagctcttttcctaacatcttccactcctgtggcctcttattaggtacctttctcagtgaagatatacaataagaattttgcatgcttattgggaatttatctgtgaaaaatcactcaaatgtcattaagtcttttctgataaaccttaatcatccaacaaccagagtttttcttaaaatagctgttgctctagaagaataccatagaatgaagttgcttcctagcatggcagtcaaggatcctggttccaagtatgagctctgaagaagatagactatgttcaccgcttactatagctgagtgcccttggacaattcatttaaactgcccctaattttcttccatcatctgtaaaatgaatgtaataatagctcttaatgagtattaaattagataataagggcactggcatttattaagaacttaataaatgttagcttttgttatttcacatttttccttgatcactcctaccaggaataaaattctgggagggtataagtaggtagtgaagtgctaactggtctggttaattgttagagttctgttaaaaaaaagttatttgaaaaaagtattttggagctaggatctaatttattaatatatctggattttctttttcaattttggtgtccattattcacataagtaattgtggttttgctatattttttcctcctgaaaaattatggctatacaactaactttattgtatactgaattttggaattttttaggatttgatgttcttactggggagaggattttgaattatttaaccac

SEQ ID NO: 2037 - DNA, 1000 bp, Homo sapiens
  source 1..1000: mol_type = genomic DNA
aacaagaggaaagcatacaaatttatttaatacatgttttatgtggcacaggagccctcataaagtaataaaaaatccccaaacacagttagagctgaacatttatatactaatctggacaaaacatttatatactgcgtggacaaagagcagtaaattgtgaaaatggaacaaggcaagggggcttagactacagtagttaatcatcaagaagtgacaaaaaaaaataagggttagttaataagatttgtttaagcagatttctcccagctttagctctctgtctctggtgatcagaatgcactccttccttcagactcagtgagcacatattccacacggaagatttcttccctagcttttaggaaatccagagaaccctttttgtatctgttgtttttttttttttttaaatgtcttgtctttaactcaaaacaatttatgtgccaggatgacatatctttggataatgtgttctgaactccttcagtacatacgtatataaattaaagcaaatattttttatgataagctggcataatagtttcataatttaatcactgatttaaaaatttaattaaaattattttttaatattttgtgtaataatttttgaggagtatcttttgtgcttaatgagtggcagatgacacccatgttcttagcagcatcattcacaatagctaaaagataggaacaactgcgtattgatggatgaatggataagcaaaatgaggtatatacatataagggaatattcttcatccttaaaaaggaaggaaattctgacatatgctacaacaaggttgaacctctaaggacattatgctaaatgaaataaaccagtctcaaaaagacaaatactatgtgattccagatacataaggcacctagagacaaactgatagagacagaaagtagaatgagtgattaccaggggttgtgagaggaaaaaagagagggttgtttgatacagagtttcagttttgcaagataaaag

SEQ ID NO: 2038 - DNA, 1000 bp, Homo sapiens
  source 1..1000: mol_type = genomic DNA
aacaggagaaaagcgtacaagtttattaaatagaagttttgcagccgggcgcgctggctcacgcttgtaatcctggcactttgggaggccgaggcgggcagatcacgaggtcaggagatcgagaccacggtgaaaccccgtctctactaaaaatacaacaaattagccaggcgtggtagcgaggcaggagaatggtgtgaacccgggaggcggagcttgcctctgcactccagatcatgccactgcactccagcctgggtgacagaccaagactccgtctcaaaaaaaaaaaaaaaaaaaaaaaaaaaaaagaagttttgcatgacatgggaaccctcataaaaaaagtgaagtcccaaaaaagtggcaaaatctaaatgcttttatattatgttgacgaaagaggggcaattgtggaaaagtaactaaattatgagggttaggctaacagaagataaaaattattttaacaagttctgtttgtataaaattttctcaatttcagctacccatccttgatgattagaatgttgcattccttctggtatacaaggaacatcttccatatgggggttttatcttctgctttcagaaaaaaaaaaataactctgtgtgtggtaggatgaaggtgtcagaacattcttcttgcacctgctggttgctatctttttaaactgcatttgtttcaaaacaatccttatgacaaaggggtgtattttggggtggcatattctgtcacccgtcaatatcaaagtggtttttgagtttgtgctcatcttctttccttattctgttccttgtaaggtaagactaaatataatggaatttgccgtcacatgtctcttatatgtagtgagttttaacaggcattccaggaaatgccatatggtcttttagcttggaaattattttagaaaacgataaaatctttagtgtgaagttatttcccagatatgtatcgctaaaattatcattacaggtgctctaggtaatatgtttg

SEQ ID NO: 2039 - DNA, 1000 bp, Homo sapiens
  source 1..1000: mol_type = genomic DNA
ttagtacttccatccctttcctggctgctctaactttacaggtacttgtaagtggcaattaagcactttttcctaattccagagtcttgccccacttcagagcaacatagagtggcctagacaggctgaggtactttgccgcttcagtcatcattaatctatggtatttactgatgagaagtaaagtggtagaagaaaaaaaaattttctgttatcctgggcacttggaaatgaatgtattctcacaatctgttctcaaaacaacttactgattctggggttctggaagctctgatgtgcaggtgagccttttaaattcctcactgttggagctcctatctaggactcactggctggatgaaaacggttctttttattgctttctgaatgtctgctagacaggcgtaagcaacaccttatatctgccttctgaaaaaggtaaaagaactgggacccatccaccatgctggacagctcggcagtggcagtggcctcccccagaccctgttccgagtgctccaccaacaaactcaccagcagtcagagtctagcctctccccaaacttcaccttcatcacaattcattttaagcccttccacaacccaatcaactctagatctacttaatggataataatttgatctcatgcaaactgcactttcctcttctcagaatgatccttctaccccttaattaaacatttgagagtgaaagaagagaaaattcgggttcaaagattggtaagtctaagaaacctaaggaaaaggagttagtaaacatgttaatcaaagagtgagcacttttcggaagcgcaacattcagatacctttcttgattggattccagaagactatttctgggaagaggagatttgcatttttctaaagtcttctacccacagcctaaccaccctagggctttgaaatattttttttctgatgtgcagtcataattgaataaataaaatgattcctgatcatttcttctcttcagctttat

SEQ ID NO: 2040 - DNA, 1000 bp, Homo sapiens
  source 1..1000: mol_type = genomic DNA
tattcctgtatttctattgtacttttttgcattaagaaacattttccaatgtaacattttaatagatttttcactatttgttgagttatttttgagtggttgtacttgagcttgccatctatgtcttaacttcagatttgtactaacttaattccagggagatatagaagcattattcctacatagctctatatcaacccccttttcctgtggtattattgttatacaaggtacaccatatatgttacaaatacaattatttatagttataattattactttaaatatatcatttatgtctattaaagaagctgagagcagagaggagataaagtatatatttatagaatttgttatattaagcttcttatttgtcattctgattctctttgttctggtggacttgagtaaatatgtgatgttatttcattatgcacacacagctttgctccttgtcattttatttatgctgtctttctcaagtatattgcatttaaatacattataggaccaacaattcaaatatatttatgttgtgttatacaattgctttttaaaatcagttaagatagatgggatatgcactgatagtatggtttttaaaattatactttaagttctgggttacatatgcagaacatgctgtttggttacataggtatacacgtgccatggtggtttgctgcacccatcaacccaccacctacattaggtatttctcctaatgttatctgtcctctggcctccaaccccccgacatgccccagtgtgtgatgttcccctccctgtgtccatgtgttctcattgttcaactcccacttatgagtgagaacatgtggtgtttggttttctgatcttgtgatagtttcctgagaatgatggtttccagcttcatccatgtccctgaaaaagatatgaactcatcctagacaataattcaaacacacacacacacacacacacacacacacacacacacacgcaaatggcactagtatct

SEQ ID NO: 2041 - DNA, 1000 bp, Homo sapiens
  source 1..1000: mol_type = genomic DNA
tccagaaaacataacaattcagaacatatatttaatccctcctcaatccagatccttgttgaaacaatgaaagagtacaatatactgccatgaaaagtactgagaaaagtctacagatagtgacatggaagaaaagaaaaaatattaaatagatcaaactagttatataatttgtatctcatttctgtaaaataaatttaacatttataagtgtattagtttgttctcacattgctataataaaatacctgagactgggtaattaaaaaaaaaaacagatttaattggcacacagttctataggctgtacagagaaaacagtggcttctgcttctggggaggtttcaggaaacttccaatcatgatggaagccgaaggggaagcagacacatcttacgtggccagagcaggagcacaagtgtgaagggaagtgtctgttcatattcttcactcactttttaatggggttgtttgtttttttcttagaaatttaagttccttgtagattctggatattaggcctttgtcagatggatagattgcaaaaatgttctcccattctgcaggttgcctgttcactttgatgatagtttcttttgctgagcagaagctctttagtttaattttgcagggacatggatgaagctggaaaccattatcttcagtagactaactgttaacaggaacagaaaaccaaaaacaaacaaaagcatgaagagggaagtgtcacccacatgagaactcactattgtgatgacaacaccaaggggaatggtgttaaaccatgagaaccggcccccatgatccaatcacttcccaccaggccccacctccaatactggatattacaattcaacaagagatttgggcaggaatacagatccaaaccatatcagtaaatataataaatatatattaataaatatgtaaatatatgtatgcaagttaacaaatgaaccagttggtatgtaagtatgtatataaaggaccatagcagtta

SEQ ID NO: 2042 - DNA, 1045 bp, Homo sapiens
  source 1..1045: mol_type = genomic DNA
ctgaatactagaggagcaagtacaacaaatggaaaatgggatcaagtatgagtgagagttgctaagatgcctggtagggatgcaaaggggtagagagcctggggagagagggtgagggagggaagcactggtttctcaagcaaaagctaaaatttttctattaagatttaacctgatgctacactttggtggtgcagcaagggtctcaaatggtataaaactcaggtgatcatgctttatgtctgtctctagaaaaatgctccaaaaatgataagtagtgataatccgcagtctcgttgcataaaatcagccccaggtgaatgactaagctccatttccctaccccacccttattacaataacctcgacaccaactctagtccgtgggaagataaactaatcggagtcgcccctcaaatcttacagctgctcactcccctgcagggcaacgcccagggaccaagttagccccttaagcctaggcaaaagaatcccgcccataatcgagaagcgactcgacatggaggcgatgacgagatcacgcgaggaggaaaggagggagggcttcttccaggcccagggcggtccttacaagacgggaggcagcagagaactcccataaaggtattgcggcactcccctccccctgcccagaagggtgcggccttctctccacctcctccaccgcagctccctcaggattgcagctcgcgccggtttttggagaacaagcgcctcccacccacaaaccagccggaccgacccccgctcctcccccacccccacgagtgcctgtagcaggtcgggcttgtctcgcccttcaggcggtgggaacccggggcggagccgcggccgccgccatccagaagtctcggccggcagcccgcccccgcctccagcgcgcgcttcctgccacgttgcgcaggggcgcggggccagacactgcggcgctcggcctcggggaggaccgtaccaacgcccgcctccccgccacccccgcgccccgcgcagtggtttcgctcatgtgagactcgagccagtagca

SEQ ID NO: 2043 - DNA, 1020 bp, Homo sapiens
  source 1..1020: mol_type = genomic DNA
gccctgccaggacggggctggctactggccttatctcacaggtaaaactgacgcacggaggaacaatataaattggggactagaaaggtgaagagccaaagttagaactcaggaccaacttattctgattttgtttttccaaactgcttctcctcttgggaagtgtaaggaagctgcagcaccaggatcagtgaaacgcaccagacggccgcgtcagagcagctcaggttctgggagagggtagcgcagggtggccactgagaaccgggcaggtcacgcatcccccccttccctcccaccccctgccaagctctccctcccaggatcctctctggctccatcgtaagcaaaccttagaggttctggcaaggagagagatggctccaggaaatgggggtgtgtcaccagataaggaatctgcctaacaggaggtgggggttagacccaatatcaggagactaggaaggaggaggcctaaggatggggcttttctgtcaccaatcctgtccctagtggccccactgtggggtggaggggacagataaaagtacccagaaccagagccacattaaccggccctgggaatataaggtggtcccagctcggggacacaggatccctggaggcagcaaacatgctgtcctgaagtggacataggggcccgggttggaggaagaagactagctgagctctcggacccctggaagatgccatgacagggggctggaagagctagcacagactagagaggtaaggggggtaggggagctgcccaaatgaaaggagtgagaggtgacccgaatccacaggagaacggggtgtccaggcaaagaaagcaagaggatggagaggtggctaaagccagggagacggggtactttggggttgtccagaaaaacggtgatgatgcaggcctacaagaaggggaggcgggacgcaagggagacatccgtcggagaaggccatcctaagaaacgagagatggcacaggccccagaaggagaaggaaaagggaaccca

SEQ ID NO: 2044 - protein, 6 aa, synthetic construct
HHHHHH

SEQ ID NO: 2045 - protein, 7 aa, synthetic construct
GHHHHHH

SEQ ID NO: 2046 - protein, 8 aa, synthetic construct
HHHHHHHH

SEQ ID NO: 2047 - protein, 9 aa, synthetic construct
GHHHHHHHH

SEQ ID NO: 2048 - DNA, 5301 bp, synthetic construct
  source 1..5301: mol_type = other DNA
cgcgcacccacacccaggccagggtgttgtccggcaccacctggtcctggaccgcgctgatgaacagggtcacgtcgtcccggaccacaccggcgaagtcgtcctccacgaagtcccgggagaacccgagccggtcggtccagaactcgaccgctccggcgacgtcgcgcgcggtgagcaccggaacggcactggtcaacttggccatactcttcctttttcaatattattgaagcatttatcagggttattgtctcatgagcggatacataacgcgtttagagtctctcagctggtacacgaagcttaatgccaacataccataaacctcccattctgctaatgcccagcctaagttggggagaccactccagattccaagatgtacagtttgctttgctgggcctttttcccatgcctgcctttactctgccagagttatattgctggggttttgaagaagatcctattaaataaaagaataagcagtattattaagtagccctgcatttcaggtttccttgagtggcaggccaggcctggccgtgaacgttcactgaaatcatggcctcttggccaagattgatagcttgtgcctgtccctgagtcccagtccatcacgagcagctggtttctaagatgctatttcccgtataaagcatgagaccgtgacttgccagccccacagagccccgcccttgtccatcactggcatctggactccagcctgggttggggcaaagagggaaatgagatcatgtcctaaccctgatcctcttgtcccacagatatccagaaccctgaccctgccgtgggcagcggcgctactaacttcagcctgctgaagcaggctggcgacgtggaggagaaccctggacctatgctgctgctggtgacatccctgctgctgtgcgaactgcctcatcccgctttcctgctgattcctgaagtccagctggtcgagagcggaggaggactggtgcagcctggaggatcactgagactgagctgcgccgcttccggattcacctttagctccttcggcatgcactgggtgaggcaggcaccaggaaaaggcctggagtgggtcgcttacatctctagtgactcaagcgccatctactatgcagataccgtgaaaggcaggtttacaatcagtcgcgacaacgctaagaattccctgtatctgcagatgaactctctgcgcgacgaggatacagcagtctactattgcgggcggggaagagaaaatatctactatggaagccgactggactactggggacagggaaccacagtgacagtctcctctggaggaggaggaagcggaggaggaggatccggaggaggcgggtctgatatccagctgactcagagcccctccttcctgtctgccagtgtgggcgacagggtcactattacctgtaaggcatcccagaacgtggataccaatgtcgcctggtaccagcagaagcccgggaaagcacctaaggccctgatctattcagccagctaccgatattctggcgtgccaagtcggttctccggatctggcagtgggactgactttacactgactattagttcactgcagcccgaagattttgctacctactattgtcagcagtacaataactacccattcaccttcggacaggggacaaaactggaaatcaaagaaagcaagtacggaccgccctgccccccttgccctggccagcctagagaaccccaggtgtacaccctgcctcccagccaggaagagatgaccaagaaccaggtgtccctgacctgcctggtcaaaggcttctaccccagcgatatcgccgtggaatgggagagcaacggccagcccgagaacaactacaagaccaccccccctgtgctggacagcgacggcagcttcttcctgtactcccggctgaccgtggacaagagccggtggcaggaaggcaacgtcttcagctgcagcgtgatgcacgaggccctgcacaaccactacacccagaagtccctgagcctgagcctgggcaagatgttctgggtgctggtggtggtcggaggcgtgctggcctgctacagcctgctggtcaccgtggccttcatcatcttttgggtgaaacggggcagaaagaaactcctgtatatattcaaacaaccatttatgagaccagtacaaactactcaagaggaagatggctgtagctgccgatttccagaagaagaagaaggaggatgtgaactgcgggtgaagttcagcagaagcgccgacgcccctgcctaccagcagggccagaatcagctgtacaacgagctgaacctgggcagaagggaagagtacgacgtcctggataagcggagaggccgggaccctgagatgggcggcaagcctcggcggaagaacccccaggaaggcctgtataacgaactgcagaaagacaagatggccgaggcctacagcgagatcggcatgaagggcgagcggaggcggggcaagggccacgacggcctgtatcagggcctgtccaccgccaccaaggatacctacgacgccctgcacatgcaggccctgcccccaagggctagcggcagtggagagggcagaggaagtctgctaacatgcggtgacgtcgaggagaatcctggcccaatggaagattttaacatggagagtgacagctttgaagatttctggaaaggtgaagatcttagtaattacagttacagctctaccctgcccccttttctactagatgccgccccatgtgaaccagaatccctggaaatcaacaagtattttgtggtcattatctatgccctggtattcctgctgagcctgctgggaaactccctcgtgatgctggtcatcttatacagcagggtcggccgctccgtcactgatgtctacctgctgaacctagccttggccgacctactctttgccctgaccttgcccatctgggccgcctccaaggtgaatggctggatttttggcacattcctgtgcaaggtggtctcactcctgaaggaagtcaacttctatagtggcatcctgctactggcctgcatcagtgtggaccgttacctggccattgtccatgccacacgcacactgacccagaagcgctacttggtcaaattcatatgtctcagcatctggggtctgtccttgctcctggccctgcctgtcttacttttccgaaggaccgtctactcatccaatgttagcccagcctgctatgaggacatgggcaacaatacagcaaactggcggatgctgttacggatcctgccccagtcctttggcttcatcgtgccactgctgatcatgctgttctgctacggattcaccctgcgtacgctgtttaaggcccacatggggcagaagcaccgggccatgcgggtcatctttgctgtcgtcctcatcttcctgctctgctggctgccctacaacctggtcctgctggcagacaccctcatgaggacccaggtgatccaggagacctgtgagcgccgcaatcacatcgaccgggctctggatgccaccgagattctgggcatccttcacagctgcctcaaccccctcatctacgccttcattggccagaagtttcgccatggactcctcaagattctagctatacatggcttgatcagcaaggactccctgcccaaagacagcaggccttcctttgttggctcttcttcagggcacacttccactactctctaactgtgccttctagttgccagccatctgttgtttgcccctcccccgtgccttccttgaccctggaaggtgccactcccactgtcctttcctaataaaatgaggaaattgcatcgcattgtctgagtaggtgtcattctattctggggggtggggtggggcaggacagcaagggggaggattgggaagacaatagcaggcatgctggggataccagctgagagactctaattccagtgacaagtctgtctgcctattcaccgattttgattctcaaacaaatgtgtcacaaagtaaggattctgatgtgtatatcacagacaaaactgtgctagacatgaggtctatggacttcaagagcaacagtgctgtggcctggagcaacaaatctgactttgcatgtgcaaacgccttcaacaacagcattattccagaagacaccttcttccccagcccaggtaagggcagctttggtgccttcgcaggctgtttccttgcttcaggaatggccaggttctgcccagagctctggtcaatgatgtctaaaactcctctgattggtggtctcggccttatccattgccaccaaaaccctctttttactaagaaacagtgagccttgttctggcagtccagagaatgacacgggaaaaaagcagatgaagagaaggtggcaggagaaagcttcgtgtaccagctgagagactctaaatcgactctagaggatcccgggtaccgagctcgaattcggatatcctcgagactagtgggcccgtttaaacacatgtgtttttccataggctccgcccccctgacgagcatcacaaaaatcgacgctcaagtcagaggtggcgaaacccgacaggactataaagataccaggcgtttccccctggaagctccctcgtgcgctctcctgttccgaccctgccgcttaccggatacctgtccgcctttctcccttcgggaagcgtggcgctttctcatagctcacgctgtaggtatctcagttcggtgtaggtcgttcgctccaagctgggctgtgtgcacgaaccccccgttcagcccgaccgctgcgccttatccggtaactatcgtcttgagtccaacccggtaagacacgacttatcgccactggcagcagccactggtaacaggattagcagagcgaggtatgtaggcggtgctacagagttcttgaagtggtggcctaactacggctacactagaaggacagtatttggtatctgcgctctgctgaagccagttaccttcggaaaaagagttggtagctcttgatccggcaaacaaaccaccgctggtagcggtggtttttttgtttgcaagcagcagattacgcgcagaaaaaaaggatctcaagaagatcctttgatcttttctacgtcagtcctgctcctcggccacgaagtgcacgcagttgccggccgggtcgcgcagggcgaactcccgcccccacggctgctcgccgatctcggtcatggccggcccggaggcgtcccggaagttcgtggacacgacctccgaccactcggcgtacagctcgtccaggc

SEQ ID NO: 2049 - DNA, 4759 bp, synthetic construct
  source 1..4759: mol_type = other DNA
attgggatcctcagcaaaggaaaattataattagaaaaagtcaatttagttattgtaattataccactaatgagagtttcctacctcgagtttcaggattacatagccatgcaccaagcaaggctttgaaaaataaagatacacagataaattatttggatagatgatcagacaagcctcagtaaaaacagccaagacaatcaggatataatgtgaccataggaagctggggagacagtaggcaatgtgcatccatgggacagcatagaaaggaggggcaaagtggagagagagcaacagacactgggatggtgaccccaaaacaatgagggcctagaatgacatagttgtgcttcattacggcccattcccagggctctctctcacacacacagagcccctaccagaaccagacagctctcagagcaaccctggctccaacccctcttccctttccagaggacctgaacaaggtgttcccacccgaggtcgctgtgtttgagccatcagaagcacgtgaggctccggtgcccgtcagtgggcagagcgcacatcgcccacagtccccgagaagttggggggaggggtcggcaattgaaccggtgcctagagaaggtggcgcggggtaaactgggaaagtgatgtcgtgtactggctccgcctttttcccgagggtgggggagaaccgtatataagtgcagtagtcgccgtgaacgttctttttcgcaacgggtttgccgccagaacacaggtaagtgccgtgtgtggttcccgcgggcctggcctctttacgggttatggcccttgcgtgccttgaattacttccacctggctgcagtacgtgattcttgatcccgagcttcgggttggaagtgggtgggagagttcgaggccttgcgcttaaggagccccttcgcctcgtgcttgagttgaggcctggcctgggcgctggggccgccgcgtgcgaatctggtggcaccttcgcgcctgtctcgctgctttcgataagtctctagccatttaaaatttttgatgacctgctgcgacgctttttttctggcaagatagtcttgtaaatgcgggccaagatctgcacactggtatttcggtttttggggccgcgggcggcgacggggcccgtgcgtcccagcgcacatgttcggcgaggcggggcctgcgagcgcggccaccgagaatcggacgggggtagtctcaagctggccggcctgctctggtgcctggcctcgcgccgccgtgtatcgccccgccctgggcggcaaggctggcccggtcggcaccagttgcgtgagcggaaagatggccgcttcccggccctgctgcagggagctcaaaatggaggacgcggcgctcgggagagcgggcgggtgagtcacccacacaaaggaaaagggcctttccgtcctcagccgtcgcttcatgtgactccactgagtaccgggcgccgtccaggcacctcgattagttctcgtgcttttggagtacgtcgtctttaggttggggggaggggttttatgcgatggagtttccccacactgagtgggtggagactgaagttaggccagcttggcacttgatgtaattctccttggaatttgccctttttgagtttggatcttggttcattctcaagcctcagacagtggttcaaagtttttttcttccatttcaggtgtcgtgagctagagccaccatggagtttgggctgagctggctttttcttgtggctattttaaaaggtgtccagtgcggatccgagctgcggatcgagacaaagggccagtacgacgaggaagagatgacaatgcagcaggccaagcggcggcagaaacgcgagtgggtcaagttcgccaagccctgcagagagggcgaggacaacagcaagcggaaccctatcgccaagatcaccagcgactaccaggccacccagaagatcacctaccggatcagcggcgtgggcatcgaccagccccctttcggcatcttcgtggtggacaagaacaccggcgacatcaacatcaccgccatcgtggacagagaggaaacccccagcttcctgatcacctgtcgggccctgaatgcccagggcctggacgtggaaaagcccctgatcctgaccgtgaagatcctggacatcaacgacaacccccccgtgttcagccagcagatcttcatgggcgagatcgaggaaaacagcgccagcaacagcctcgtgatgatcctgaacgccaccgacgccgacgagcccaaccacctgaatagcaagatcgccttcaagatcgtgtcccaggaacccgccggaacccccatgttcctgctgagcagaaataccggcgaagtgcggaccctgaccaacagcctggatagagagcaggccagcagctaccggctggtggtgtctggcgctgacaaggatggcgagggcctgagcacacagtgcgagtgcaacatcaaagtgaaggacgtgaacgacaacttccctatgttccgggacagccagtacagcgcccggatcgaagagaacatcctgagcagcgagctgctgcggttccaagtgaccgacctggacgaagagtacaccgacaactggctggccgtgtacttcttcaccagcggcaacgagggcaattggttcgagatccagaccgacccccggaccaatgagggcatcctgaaggtcgtgaaggccctggactacgagcagctgcagagcgtgaagctgtctatcgccgtgaagaacaaggccgagttccaccagtccgtgatcagccggtacagagtgcagagcacccccgtgaccatccaagtgatcaacgtgcgcgagggcattgccttcgctagcggtggcggaggttctggaggtggaggttcctccggaatctacatctgggcgcccttggccgggacttgtggggtccttctcctgtcactggttatcaccctttactgcaaacggggcagaaagaaactcctgtatatattcaaacaaccatttatgagaccagtacaaactactcaagaggaagatggctgtagctgccgatttccagaagaagaagaaggaggatgtgaactgagagtgaagttcagcaggagcgcagacgcccccgcgtaccagcagggccagaaccagctctataacgagctcaatctaggacgaagagaggagtacgatgttttggacaagagacgtggccgggaccctgagatggggggaaagccgagaaggaagaaccctcaggaaggcctgtacaatgaactgcagaaagataagatggcggaggcctacagtgagattgggatgaaaggcgagcgccggaggggcaaggggcacgatggcctttaccagggtctcagtacagccaccaaggacacctacgacgcccttcacatgcaggccctgccccctcgctaagtcgacaatcaacctctggattacaaaatttgtgaaagattgactggtattcttaactatgttgctccttttacgctatgtggatacgctgctttaatgcctttgtatcatgctattgcttcccgtatggctttcattttctcctccttgtataaatcctggttgctgtctctttatgaggagttgtggcccgttgtcaggcaacgtggcgtggtgtgcactgtgtttgctgacgcaacccccactggttggggcattgccaccacctgtcagctcctttccgggactttcgctttccccctccctattgccacggcggaactcatcgccgcctgccttgcccgctgctggacaggggctcggctgttgggcactgacaattccgtggtgttgtcggggaagctgacgtcctttccttggctgctcgcctgtgttgccacctggattctgcgcgggacgtccttctgctacgtcccttcggccctcaatccagcggaccttccttcccgcggcctgctgccggctctgcggcctcttccgcgtcttcgccttcgccctcagacgagtcggatctccctttgggccgcctccccgcctgcgactgtgccttctagttgccagccatctgttgtttgcccctcccccgtgccttccttgaccctggaaggtgccactcccactgtcctttcctaataaaatgaggaaattgcatcgcattgtctgagtaggtgtcattctattctggggggtggggtggggcaggacagcaagggggaggattgggaagacaatagcaggcatgctggggatgcggtgggctctatgggagatctcccacacccaaaaggccacactggtgtgcctggccacaggcttcttccctgaccacgtggagctgagctggtgggtgaatgggaaggaggtgcacagtggggtcagcacggacccgcagcccctcaaggagcagcccgccctcaatgactccagatactgcctgagcagccgcctgagggtctcggccaccttctggcagaacccccgcaaccacttccgctgtcaagtccagttctacgggctctcggagaatgacgagtggacccaggatagggccaaacccgtcacccagatcgtcagcgccgaggcctggggtagagcaggtgagtggggcctggggagatgcctggaggagattaggtgagaccagctaccagggaaaatggaaagatccaggtagcagacaagactagatccaaaaagaaaggaaccagcgcacaccatgaaggagaattgggcacctgtggttcattcttctcccagattctcagc

SEQ ID NO: 2050 - DNA, 3885 bp, synthetic construct
  source 1..3885: mol_type = other DNA
cgcgcacccacacccaggccagggtgttgtccggcaccacctggtcctggaccgcgctgatgaacagggtcacgtcgtcccggaccacaccggcgaagtcgtcctccacgaagtcccgggagaacccgagccggtcggtccagaactcgaccgctccggcgacgtcgcgcgcggtgagcaccggaacggcactggtcaacttggccatactcttccttttcaatattattgaagcatttatcagggttattgtctcatgagcggatacataacgcgtgccctcagtatcctggatctgaaaattgggatcctcagcagacacgtgagtttattggtcttttatttatgccctgtctgaggatgcagattggtgggtagatgagaaggaactgattgagagagattaaccccaagaactgatatcttcccagcattgcattctcaactccattttagaaaggttccaaatagggacttctgtgggtttttctttacatccatcttacccttcccaagtccccatgtccctgcgtaaaccctaaagccacctctcaaaaggttctctagttcccttcaaggttctctagttcccttcattccacatatctcctcttccacaccctctagccagtagagctcccttctgacaagcaagtctaagatctagatgacagatgacttcctgcatttgggtggttcttttgtcactaatttgccttttctaaaattgtcctggtttcttctgccaatttcccttctttctccccagcatataaagtctccatctctggaaccacagtaatattgacatgccctggcagcggcgctactaacttcagcctgctgaagcaggctggcgacgtggaggagaaccctggacctatggctctcccagtgactgccctactgcttcccctagcgcttctcctgcatgcagaggtgaagctgcagcagtctggggctgagctggtgaggcctgggtcctcagtgaagatttcctgcaaggcttctggctatgcattcagtagctactggatgaactgggtgaagcagaggcctggacagggtcttgagtggattggacagatttatcctggagatggtgatactaactacaatggaaagttcaagggtcaagccacactgactgcagacaaatcctccagcacagcctacatgcagctcagcggcctaacatctgaggactctgcggtctatttctgtgcaagaaagaccattagttcggtagtagatttctactttgactactggggccaagggaccacggtcaccgtctcctcaggtggaggtggatcaggaggtggaggttctggtggaggaggatctgacattgagctcacccagtctccaaaattcatgtccacatcagtaggagacagggtcagcgtcacctgcaaggccagtcagaatgtgggtactaatgtagcctggtatcaacagaaaccaggacaatctcctaaaccactgatttactcggcaacctaccggaacagtggagtccctgatcgcttcacaggcagtggatctgggacagatttcactctcaccatcactaacgtgcagtctaaagacttggcagactatttctgtcaacaatataacaggtatccgtacacgtccggaggggggaccaagctggagatcaaacgggcggccgcaattgaagttatgtatcctcctacttacctagacaatgagaagagcaatggaaccattatccatgtgaaagggaaacacctttgtccaagtcccctatttcccggaccttctaagcccttttgggtgctggtggtggttggtggagtcctggcttgctatagcttgctagtaacagtggcctttattattttctgggtgaggagtaagaggagcaggctcctgcacagtgactacatgaacatgactcctcgccgccccgggcctacacgcaagcattaccagccctatgccccaccacgcgacttcgcagcctatcgctccagagtgaagttcagcaggagcgcagagccccccgcgtaccagcagggccagaaccagctctataacgagctcaatctaggacgaagagaggagtacgatgttttggacaagagacgtggccgggaccctgagatggggggaaagccgagaaggaagaaccctcaggaaggcctgtacaatgaactgcagaaagataagatggcggaggcctacagtgagattgggatgaaaggcgagcgccggaggggcaaggggcacgatggcctttaccagggtctcagtacagccaccaaggacacctacgacgcccttcacatgcaggccctgccccctcgctaacgactgtgccttctagttgccagccatctgttgtttgcccctcccccgtgccttccttgaccctggaaggtgccactcccactgtcctttcctaataaaatgaggaaattgcatcgcattgtctgagtaggtgtcattctattctggggggtggggtggggcaggacagcaagggggaggattgggaagacaatagcaggcatgctggggatgcggtgggctctatggcagtatcctggatctgaaatactatggcaacacaatgataaaaacataggcggtgatgaggatgataaaaacataggcagtgatgaggatcacctgtcactgaaggaattttcagaattggagcaaagtggttattatgtctgctaccccagaggaagcaaaccagaagatgcgaacttttatctctacctgagggcaagaggtaatccaggtctccagaacaggtaccaccggctctttagggaggaccattcaaaagggcattctcagtgattttccctaacccagctcacagtgcccaggcgtctttgcgcttcctcccacactcaatcctgggactctctggtaccacacggcatcagtgttttctggaatatagattaaacaccaatatgaggcttctgggtaaccccagtctgtgcgagatctaaaatagcaactccctaagagacaggactgggtcatttgcaccgcatcacacccaggttcatagcacaccagcggccgctttcagatccaggatactgagggcatgtttttccataggctccgccaccctgacgagcatcacaaaaatcgacgctcaagtcagaggtggcgaaacccgacaggactataaagataccaggcgtttccccctggacgctccctcgtgcgctctcctgttccgaccctgccgcttaccggatacctgtccgcctttctcccttcgggaagcgtggcgctttctcatagctcacgctgtaggtatctcagttcggtgtaggtcgttcgctccaagctgggctgtgtgcacgaaccccccgttcagcccgaccgctgcgccttatccggtaactatcgtcttgagtccaacccggtaagacacgacttatcgccactggcagcagccactggtaacaggattagcagagcgaggtatgtaggcggtgctacagagttcttgaagtggtggcctaactacggctacactagaagaacagtatttggtatccgcgctctgctgaagccagttaccttcggaaaaagagttggtagctcttgatccggcaaacaaaccaccgctggtagcggtggtttttttgtttgcaagcagcagattacgcgcaggaaaaaaggatctcaagaagatcctttgatcttttctacgtcagtcctgctcctcggccacgaagtgcacgcagttgccggccgggtcgcgcagggcgaactcccgcccccacggctgctcgccgatctcggtcatggccggcccggaggcgtcccggaagttcgtggacacgacctccgaccactcggcgtacagctcgtccaggc

SEQ ID NO: 2051 - DNA, 5559 bp, synthetic construct
  source 1..5559: mol_type = other DNA
tttccataggctccgccaccctgacgagcatcacaaaaatcgacgctcaagtcagaggtggcgaaacccgacaggactataaagataccaggcgtttccccctggaagctccctcgtgcgctctcctgttccgaccctgccgcttaccggatacctgtccgcctttctcccttcgggaagcgtggcgctttctcatagctcacgctgtaggtatctcagttcggtgtaggtcgttcgctccaagctgggctgtgtgcacgaaccccccgttcagcccgaccgctgcgccttatccggtaactatcgtcttgagtccaacccggtaagacacgacttatcgccactggcagcagccactggtaacaggattagcagagcgaggtatgtaggcggtgctacagagttcttgaagtggtggcctaactacggctacactagaaggacagtatttggtatctgcgctctgctgaagccagttaccttcggaaaaagagttggtagctcttgatccggcaaacaaaccaccgctggtagcggtggtttttttgtttgcaagcagcagattacgcgcagaaaaaaaggatctcaagaagatcctttgatcttttctacgtcagtcctgctcctcggccacgaagtgcacgcagttgccggccgggtcgcgcagggcgaactcccgcccccacggctgctcgccgatctcggtcatggccggcccggaggcgtcccggaagttcgtggacacgacctccgaccactcggcgtacagctcgtccaggccgcgcacccacacccaggccagggtgttgtccggcaccacctggtcctggaccgcgctgatgaacagggtcacgtcgtcccggaccacaccggcgaagtcgtcctccacgaagtcccgggagaacccgagccggtcggtccagaactcgaccgctccggcgacgtcgcgcgcggtgagcaccggaacggcactggtcaacttggccatactcttccttttcaatattattgaagcatttatcagggttattgtctcatgagcggatacataacgcgtgccctcagtatcctggatctgaaaattgggatcctcagcagacacgtgagtttattggtcttttatttatgccctgtctgaggatgcagattggtgggtagatgagaaggaactgattgagagagattaaccccaagaactgatatcttcccagcattgcattctcaactccattttagaaaggttccaaatagggacttctgtgggtttttctttacatccatcttacccttcccaagtccccatgtccctgcgtaaaccctaaagccacctctcaaaaggttctctagttcccttcaaggttctctagttcccttcattccacatatctcctcttccacaccctctagccagtagagctcccttctgacaagcaagtctaagatctagatgacagatgacttcctgcatttgggtggttcttttgtcactaatttgccttttctaaaattgtcctggtttcttctgccaatttcccttctttctccccagcatataaagtctccatctctggaaccacagtaatattgacatgccctgatatctcgactagttattaatagtaatcaattacggggtcattagttcatagcccatatatggagttccgcgttacataacttacggtaaatggcccgcctggctgaccgcccaacgacccccgcccattgacgtcaataatgacgtatgttcccatagtaacgccaatagggactttccattgacgtcaatgggtggagtatttacggtaaactgcccacttggcagtacatcaagtgtatcatatgccaagtacgccccctattgacgtcaatgacggtaaatggcccgcctggcattatgcccagtacatgaccttatgggactttcctacttggcagtacatctacgtattagtcatcgctattaccatggtcgaggtgagccccacgttctgcttcactctccccatctcccccccctccccacccccaattttgtatttatttattttttaattattttgtgcagcgatgggggcggggggggggggggggcgcgcgccaggcggggcggggcggggcgaggggcggggcggggcgaggcggagaggtgcggcggcagccaatcagagcggcgcgctccgaaagtttccttttatggcgaggcggcggcggcggcggccctataaaaagcgaagcgcgcggcgggcggggagtcgctgcgacgctgccttcgccccgtgccccgctccgccgccgcctcgcgccgcccgccccggctctgactgaccgcgttactcccacaggtgagcgggcgggacggcccttctcctccgggctgtaattagcgcttggtttaatgacggcttgtttcttttctgtggctgcgtgaaagccttgaggggctccgggagggccctttgtgcggggggagcggctcggggggtgcgtgcgtgtgtgtgtgcgtggggagcgccgcgtgcggctccgcgctgcccggcggctgtgagcgctgcgggcgcggcgcggggctttgtgcgctccgcagtgtgcgcgaggggagcgcggccgggggcggtgccccgcggtgcggggggggctgcgaggggaacaaaggctgcgtgcggggtgtgtgcgtgggggggtgagcagggggtgtgggcgcgtcggtcgggctgcaaccccccctgcacccccctccccgagttgctgagcacggcccggcttcgggtgcggggctccgtacggggcgtggcgcggggctcgccgtgccgggcggggggtggcggcaggtgggggtgccgggcggggcggggccgcctcgggccggggagggctcgggggaggggcgcggcggcccccggagcgccggcggctgtcgaggcgcggcgagccgcagccattgccttttatggtaatcgtgcgagagggcgcagggacttcctttgtcccaaatctgtgcggagccgaaatctgggaggcgccgccgcaccccctctagcgggcgcggggcgaagcggtgcggcgccggcaggaaggaaatgggcggggagggccttcgtgcgtcgccgcgccgccgtccccttctccctctccagcctcggggctgtccgcggggggacggctgccttcgggggggacggggcagggcggggttcggcttctggcgtgtgaccggcggctctagagcctctgctaaccatgttcatgccttcttctttttcctacagctcctgggcaacgtgctggttattgtgctgtctcatcattttggcaaagaattaattcggatccaccatggctctcccagtgactgccctactgcttcccctagcgcttctcctgcatgcagaggtgaagctgcagcagtctggggctgagctggtgaggcctgggtcctcagtgaagatttcctgcaaggcttctggctatgcattcagtagctactggatgaactgggtgaagcagaggcctggacagggtcttgagtggattggacagatttatcctggagatggtgatactaactacaatggaaagttcaagggtcaagccacactgactgcagacaaatcctccagcacagcctacatgcagctcagcggcctaacatctgaggactctgcggtctatttctgtgcaagaaagaccattagttcggtagtagatttctactttgactactggggccaagggaccacggtcaccgtctcctcaggtggaggtggatcaggaggtggaggttctggtggaggaggatctgacattgagctcacccagtctccaaaattcatgtccacatcagtaggagacagggtcagcgtcacctgcaaggccagtcagaatgtgggtactaatgtagcctggtatcaacagaaaccaggacaatctcctaaaccactgatttactcggcaacctaccggaacagtggagtccctgatcgcttcacaggcagtggatctgggacagatttcactctcaccatcactaacgtgcagtctaaagacttggcagactatttctgtcaacaatataacaggtatccgtacacgtccggaggggggaccaagctggagatcaaacgggcggccgcaattgaagttatgtatcctcctacttacctagacaatgagaagagcaatggaaccattatccatgtgaaagggaaacacctttgtccaagtcccctatttcccggaccttctaagcccttttgggtgctggtggtggttggtggagtcctggcttgctatagcttgctagtaacagtggcctttattattttctgggtgaggagtaagaggagcaggctcctgcacagtgactacatgaacatgactcctcgccgccccgggcctacacgcaagcattaccagccctatgccccaccacgcgacttcgcagcctatcgctccagagtgaagttcagcaggagcgcagagccccccgcgtaccagcagggccagaaccagctctataacgagctcaatctaggacgaagagaggagtacgatgttttggacaagagacgtggccgggaccctgagatggggggaaagccgagaaggaagaaccctcaggaaggcctgtacaatgaactgcagaaagataagatggcggaggcctacagtgagattgggatgaaaggcgagcgccggaggggcaaggggcacgatggcctttaccagggtctcagtacagccaccaaggacacctacgacgcccttcacatgcaggccctgccccctcgctaacgactgtgccttctagttgccagccatctgttgtttgcccctcccccgtgccttccttgaccctggaaggtgccactcccactgtcctttcctaataaaatgaggaaattgcatcgcattgtctgagtaggtgtcattctattctggggggtggggtggggcaggacagcaagggggaggattgggaagacaatagcaggcatgctggggatgcggtgggctctatggcagtatcctggatctgaaatactatggcaacacaatgataaaaacataggcggtgatgaggatgataaaaacataggcagtgatgaggatcacctgtcactgaaggaattttcagaattggagcaaagtggttattatgtctgctaccccagaggaagcaaaccagaagatgcgaacttttatctctacctgagggcaagaggtaatccaggtctccagaacaggtaccaccggctctttagggaggaccattcaaaagggcattctcagtgattttccctaacccagctcacagtgcccaggcgtctttgcgcttcctcccacactcaatcctgggactctctggtaccacacggcatcagtgttttctggaatatagattaaacaccaatatgaggcttctgggtaaccccagtctgtgcgagatctaaaatagcaactccctaagagacaggactgggtcatttgcaccgcatcacacccaggttcatagcacaccagcggccgctttcagatccaggatactgagggcatgtt

SEQ ID NO: 2052 - DNA, 5091 bp, synthetic construct
  source 1..5091: mol_type = other DNA
aggctaggtggaggctcagtgatgataagtctgcgatggtggatgcatgtgtcatggtcatagctgtttcctgtgtgaaattgttatccgctcagagggcacaatcctattccgcgctatccgacaatctccaagacattaggtggagttcagttcggcgtatggcatatgtcgctggaaagaacatgtgagcaaaaggccagcaaaaggccaggaaccgtaaaaaggccgcgttgctggcgtttttccataggctccgcccccctgacgagcatcacaaaaatcgacgctcaagtcagaggtggcgaaacccgacaggactataaagataccaggcgtttccccctggaagctccctcgtgcgctctcctgttccgaccctgccgcttaccggatacctgtccgcctttctcccttcgggaagcgtggcgctttctcatagctcacgctgtaggtatctcagttcggtgtaggtcgttcgctccaagctgggctgtgtgcacgaaccccccgttcagcccgaccgctgcgccttatccggtaactatcgtcttgagtccaacccggtaagacacgacttatcgccactggcagcagccactggtaacaggattagcagagcgaggtatgtaggcggtgctacagagttcttgaagtggtggcctaactacggctacactagaagaacagtatttggtatctgcgctctgctgaagccagttaccttcggaaaaagagttggtagctcttgatccggcaaacaaaccaccgctggtagcggtggtttttttgtttgcaagcagcagattacgcgcagaaaaaaaggatctcaagaagatcctttgatcttttctacggggtctgacgctctattcaacaaagccgccgtcccgtcaagtcagcgtaaatgggtagggggcttcaaatcgtcctcgtgataccaattcggagcctgcttttttgtacaaacttgttgataatggcaattcaaggatcttcacctagatccttttaaattaaaaatgaagttttaaatcaatctaaagtatatatgagtaaacttggtctgacagttaccaatgcttaatcagtgaggcacctatctcagcgatctgtctatttcgttcatccatagttgcctgactccccgtcgtgtagataactacgatacgggagggcttaccatctggccccagtgctgcaatgataccgcgagagccacgctcaccggctccagatttatcagcaataaaccagccagccggaagggccgagcgcagaagtggtcctgcaactttatccgcctccatccagtctattaattgttgccgggaagctagagtaagtagttcgccagttaatagtttgcgcaacgttgttgccattgctacaggcatcgtggtgtcacgctcgtcgtttggtatggcttcattcagctccggttcccaacgatcaaggcgagttacatgatcccccatgttgtgcaaaaaagcggttagctccttcggtcctccgatcgttgtcagaagtaagttggccgcagtgttatcactcatggttatggcagcactgcataattctcttactgtcatgccatccgtaagatgcttttctgtgactggtgagtactcaaccaagtcattctgagaatagtgtatgcggcgaccgagttgctcttgcccggcgtcaatacgggataataccgcgccacatagcagaactttaaaagtgctcatcattggaaaacgttcttcggggcgaaaactctcaaggatcttaccgctgttgagatccagttcgatgtaacccactcgtgcacccaactgatcttcagcatcttttactttcaccagcgtttctgggtgagcaaaaacaggaaggcaaaatgccgcaaaaaagggaataagggcgacacggaaatgttgaatactcatactcttcctttttcaatattattgaagcatttatcagggttattgtctcatgagcggatacatatttgaatgtatttagaaaaataaacaaataggggttccgcgcacatttccccgaaaagtgccagatacctgaaacaaaacccatcgtacggccaaggaagtctccaataactgtgatccaccacaagcgccagggttttcccagtcacgacgttgtaaaacgacggccagtcatgcataatccgcacgcatctggaataaggaagtgccattccgcctgacctcctcagcaatgccaacataccataaacctcccattctgctaatgcccagcctaagttggggagaccactccagattccaagatgtacagtttgctttgctgggcctttttcccatgcctgcctttactctgccagagttatattgctggggttttgaagaagatcctattaaataaaagaataagcagtattattaagtagccctgcatttcaggtttccttgagtggcaggccaggcctggccgtgaacgttcactgaaatcatggcctcttggccaagattgatagcttgtgcctgtccctgagtcccagtccatcacgagcagctggtttctaagatgctatttcccgtataaagcatgagaccgtgacttgccagccccacagagccccgcccttgtccatcactggcatctggactccagcctgggttggggcaaagagggaaatgagatcatgtcctaaccctgatcctcttgtcccacagatatccagaaccctgaccctgccgtgggcagcggcgctactaacttcagcctgctgaagcaggctggcgacgtggaggagaaccctggacctatggctctcccagtgactgccctactgcttcccctagcgcttctcctgcatgcagaggtgaagctgcagcagtctggggctgagctggtgaggcctgggtcctcagtgaagatttcctgcaaggcttctggctatgcattcagtagctactggatgaactgggtgaagcagaggcctggacagggtcttgagtggattggacagatttatcctggagatggtgatactaactacaatggaaagttcaagggtcaagccacactgactgcagacaaatcctccagcacagcctacatgcagctcagcggcctaacatctgaggactctgcggtctatttctgtgcaagaaagaccattagttcggtagtagatttctactttgactactggggccaagggaccacggtcaccgtctcctcaggtggaggtggatcaggtggaggtggatctggtggaggtggatctgacattgagctcacccagtctccaaaattcatgtccacatcagtaggagacagggtcagcgtcacctgcaaggccagtcagaatgtgggtactaatgtagcctggtatcaacagaaaccaggacaatctcctaaaccactgatttactcggcaacctaccggaacagtggagtccctgatcgcttcacaggcagtggatctgggacagatttcactctcaccatcactaacgtgcagtctaaagacttggcagactatttctgtcaacaatataacaggtatccgtacacgtccggaggggggaccaagctggagatcaaacgggcggccgcaattgaagttatgtatcctcctacttacctagacaatgagaagagcaatggaaccattatccatgtgaaagggaaacacctttgtccaagtcccctatttcccggaccttctaagcccttttgggtgctggtggtggttggtggagtcctggcttgctatagcttgctagtaacagtggcctttattattttctgggtgaggagtaagaggagcaggctcctgcacagtgactacatgaacatgactccccgccgccccgggcccacccgcaagcattaccagccctatgccccaccacgcgacttcgcagcctatcgctccagagtgaagttcagcaggagcgcagagccccccgcgtaccagcagggccagaaccagctctataacgagctcaatctaggacgaagagaggagtacgatgttttggacaagagacgtggccgggaccctgagatggggggaaagccgagaaggaagaaccctcaggaaggcctgtacaatgaactgcagaaagataagatggcggaggcctacagtgagattgggatgaaaggcgagcgccggaggggcaaggggcacgatggcctttaccagggtctcagtacagccaccaaggacacctacgacgcccttcacatgcaggccctgccccctcgctaacgactgtgccttctagttgccagccatctgttgtttgcccctcccccgtgccttccttgaccctggaaggtgccactcccactgtcctttcctaataaaatgaggaaattgcatcgcattgtctgagtaggtgtcattctattctggggggtggggtggggcaggacagcaagggggaggattgggaagacaatagcaggcatgctggggataccagctgagagactctaattccagtgacaagtctgtctgcctattcaccgattttgattctcaaacaaatgtgtcacaaagtaaggattctgatgtgtatatcacagacaaaactgtgctagacatgaggtctatggacttcaagagcaacagtgctgtggcctggagcaacaaatctgactttgcatgtgcaaacgccttcaacaacagcattattccagaagacaccttcttccccagcccaggtaagggcagctttggtgccttcgcaggctgtttccttgcttcaggaatggccaggttctgcccagagctctggtcaatgatgtctaaaactcctctgattggtggtctcggccttatccattgccaccaaaaccctctttttactaagaaacagtgagccttgttctggcagtccagagaatgacacgggaaaaaagcagatgaagagaaggtggcaggagagggcacgtggcccagcctcagtctctccaactgagttcctgcctgcctgcctttgctcagactgtttgccccttactgctcttctaggcctcattctaagccccttctccaagttgcctctccttatttctccctgtctgccaagcggccgc

What is claimed is:

1. A composition comprising a modified human cell comprising:
(a) a first genomic modification comprising a first portion of a first polynucleotide, wherein the first portion codes for a first chimeric antigen receptor (CAR) or portion thereof, inserted into a site with a TRAC gene, whereby the TRAC gene is partially or completely inactivated and the first CAR or portion thereof is expressed; and
(b) a second genomic modification comprising a second polynucleotide coding for a fusion protein of B2M and HLA-E or HLA-G inserted into a B2M gene, whereby endogenous B2M is partially or completely inactivated and the fusion protein is expressed.

2. The composition of claim 1, wherein the TRAC gene is completely inactivated.

3. The composition of claim 1 or claim 2, wherein the endogenous B2M gene is completely inactivated.

4. The composition of any one of claims 1-3, further comprising:
(c) a third genomic modification in a CIITA gene, wherein the CIITA gene is partially or completely inactivated.

5. The composition of claim 4, wherein the CIITA gene is completely inactivated.

6. The composition of claim 4 or claim 5, wherein the third genomic modification comprises a substitution, an insertion, a deletion, a nonsense mutation, or a truncation.

7. The composition of any one of claims 1 through 6, wherein the CAR or portion thereof comprises a polypeptide that binds at least one of B7H3, BCMA, GPRC5D, CD8, CD8a, CD19, CD20, CD22, CD28, 4-1BB, or CD3zeta.

8. The composition of claim 7, wherein the CAR or portion thereof comprises a the CAR or portion thereof comprises a polypeptide at least 60, at least 70, at least 80, at least 90, at least 95, at least 99%, or 100% identical to any one of the amino acid sequences of SEQ ID NOS: 86-124.

9. The composition of claim 1 or claim 6, wherein the CAR or portion thereof comprises a polypeptide that binds at least one of B7H3, BCMxA, GPRC5D, CD8, CD8a, CD20, CD22, CD28, 4-1BB, or CD3zeta.

10. The composition of claim 9, wherein the CAR or portion thereof comprises a polypeptide at least 60, at least 70, at least 80, at least 90, at least 95, at least 99%, or 100% identical to any one of the amino acid sequences of SEQ ID NOs: 86-104 or 116-124.

11. The composition of any one of claims 1 through 10, further comprising a second portion of the first polynucleotide, wherein the second portion codes for a second CAR or portion thereof, different from the first CAR or portion thereof.

12. A composition comprising a modified human cell comprising:
(a) a first genomic modification comprising a first portion of a polynucleotide, wherein the first portion codes for a first chimeric antigen receptor (CAR) or portion thereof, inserted into a site with a TRAC gene, whereby the TRAC gene is partially or completely inactivated and the first CAR or portion thereof is expressed; and
(b) a second genomic modification in a CIITA gene, wherein the CIITA gene is partially or completely inactivated.

13. The composition of claim 12, wherein the TRAC gene is completely inactivated.

14. The composition of claim 12 or claim 13, wherein the CIITA gene is completely inactivated.

15. The composition of any one of claims 12 through 14, further comprising:
(c) a third genomic modification comprising a polynucleotide coding for a fusion protein of B2M and HLA-E or HLA-G inserted into a B2M gene, whereby endogenous B2M is partially or completely inactivated and the fusion protein is expressed.

16. The composition of claim 15, wherein endogenous B2M is completely inactivated.

17. The composition of claim 12, wherein the second genomic modification comprises a substitution, an insertion, a deletion, a nonsense mutation, or a truncation.

18. The composition of any one of claims 12 through 17, wherein the CAR or portion thereof comprises a polypeptide that binds at least one of B7H3, BCMA, GPRC5D, CD8, CD8a, CD19, CD20, CD22, CD28, 4-1BB, or CD3zeta.

19. The composition of claim 18, wherein the CAR or portion thereof comprises a polypeptide at least 60, at least 70, at least 80, at least 90, at least 95, at least 99%, or 100% identical to any one of the amino acid sequences of SEQ ID NOs: 86-124.

20. The composition of any one of claims 12 through 17, wherein the CAR or portion thereof comprises a polypeptide that binds at least one of B7H3, BCMA, GPRC5D, CD8, CD8a, CD20, CD22, CD28, 4-1BB, or CD3zeta.

21. The composition of claim 20, wherein the CAR or portion thereof comprises a polypeptide at least 60, at least 70, at least 80, at least 90, at least 95, at least 99%, or 100% identical to any one of the amino acid sequences of SEQ ID NOs: 86-104 or 116-124.

22. The composition of any one of claims 12 through 21, further comprising a second portion of the polynucleotide, wherein the second potion codes for a second CAR or portion thereof, different from the first CAR or portion thereof.

23. A composition comprising a modified human cell comprising:
(a) a first genomic modification comprising a polynucleotide coding for a fusion protein of B2M and HLA-E or HLA-G inserted into a B2M gene, whereby endogenous B2M is partially or completely inactivated and the fusion protein is expressed; and
(b) a second genomic modification in a CIITA gene, wherein the CIITA gene is partially or completely inactivated.

24. The composition of claim 23, wherein the endogenous B2M gene is completely inactivated.

25. The composition of claim 23 or claim 24, wherein the CIITA gene is completely inactivated.

26. The composition of claim 25, wherein the second genomic modification comprises a substitution, an insertion, a deletion, a nonsense mutation, or a truncation.

27. The composition of any one of claims 23 through 26, further comprising:
(c) a third genomic modification comprising a first portion of a polynucleotide, wherein the first portion codes for a first chimeric antigen receptor (CAR) or portion thereof, inserted into a site with a TRAC gene, whereby the TRAC gene is partially or completely inactivated and the first CAR or portion thereof is expressed.

28. The composition of claim 27, wherein the CAR or portion thereof comprises a polypeptide that binds at least one of B7H3, BCMA, GPRC5D, CD8, CD8a, CD19, CD20, CD22, CD28, 4-1BB, or CD3zeta.

29. The composition of claim 28, wherein the CAR or portion thereof comprises a polypeptide at least 60, at least 70, at least 80, at least 90, at least 95, at least 99%, or 100% identical to any one of the amino acid sequences of SEQ ID NOs: 86-124.

30. The composition of claim 27, wherein the CAR or portion thereof comprises a polypeptide that binds at least one of B7H3, BCMxA, GPRC5D, CD8, CD8a, CD20, CD22, CD28, 4-1BB, or CD3zeta.

31. The composition of claim 29, wherein the CAR or portion thereof comprises a polypeptide at least 60, at least 70, at least 80, at least 90, at least 95, at least 99%, or 100% identical to any one of the amino acid sequences of SEQ ID NOs: 86-104 or 116-124.

32. The composition of any one of claims 27 through 31, further comprising a second portion of the first polynucleotide, wherein the second portion codes for a second CAR or portion thereof, different from the first CAR or portion thereof.

33. The composition of any one of claims 1 through 32, wherein the cell comprises an immune cell or a stem cell.

34. The composition of claim 33, wherein the cell comprises an immune cell comprising a neutrophil, eosinophil, basophil, mast cell, monocyte, macrophage, dendritic cell, natural killer cell, or a lymphocyte.

35. The composition of claim 33, wherein the cell comprises a T cell.

36. The composition of claim 33, wherein the cell comprises a stem cell comprising a human pluripotent, multipotent stem cell, embryonic stem cell, induced pluripotent stem cell, hematopoietic stem cell, or a CD34+ cell.

37. The composition of claim 33, wherein the cell comprises a stem cell comprising an iPSC.

38. The composition of any one of claims 1 through 37, further comprising a nuclease system or one or more polynucleotides encoding for one or more parts of the system comprising:
(1) a nucleic acid-guided nuclease; and
(2) a guide nucleic acid compatible with and capable of binding to and activating the nucleic acid-guided nuclease and comprising a spacer sequence complementary to a target nucleotide sequence in a polynucleotide of a human genome;
wherein, contacting the target polynucleotide with the nuclease system results in a strand break in at least one strand of the target polynucleotide of the genome of the human cell at or near the target nucleotide sequence.

39. The composition of claim 38, wherein the nucleic acid-guided nuclease comprises an engineered, non-naturally occurring nuclease.

40. The composition of claim 38 or claim 39, wherein the nucleic acid-guided nuclease comprises a Class 1 or a Class 2 nuclease.

41. The composition of claim 40, wherein the nucleic acid-guided nuclease comprises a Type II or a Type V nuclease.

42. The composition of claim 41, wherein the nucleic acid-guided nuclease comprises a Type V-A, V-B, V-C, V-D, or V-E nuclease.

43. The composition of claim 42, wherein the nucleic acid-guided nuclease comprises a Type V-A nuclease.

44. The composition of claim 43, wherein the nucleic acid-guided nuclease comprises a MAD nuclease, an ART nuclease, or an ABW nuclease.

45. The composition of claim 44, wherein the nucleic acid-guided nuclease comprises an amino acid sequence at least 80%, at least 85%, at least 90%, at least 95%, at least 99%, or 100% identical to an amino acid sequence of a MAD, ART, or ABW nuclease.

46. The composition of claim 44, wherein the nucleic acid-guided nuclease comprises a MAD1, MAD2, MAD3, MAD4, MAD5, MAD6, MAD7, MAD8, MAD9, MAD10, MAD11, MAD12, MAD13, MAD14, MAD15, MAD16, MAD17, MAD18, MAD19, or MAD20 nuclease.

47. The composition of claim 44, wherein the nucleic acid-guided nuclease comprises an ART1, ART2, ART3, ART4, ART5, ART6, ART7, ART8, ART9, ART10, ART11, ART11*, ART12, ART13, ART14, ART15, ART16, ART17, ART18, ART19, ART20, ART21, ART22, ART23, ART24, ART25, ART26, ART27, ART28, ART29, ART30, ART31, ART32, ART33, ART34, or ART35 nuclease.

48. The composition of claim 44, wherein the nucleic acid-guided nuclease comprises an amino acid sequence at least 80%, at least 85%, at least 90%, at least 95%, at least 99%, or 100% identical, to the amino acid sequence of MAD2, MAD7, ART2, ART11, or ART11*.

49. The composition of claim 44, wherein the nucleic acid-guided nuclease comprises an amino acid sequence that is at least 80%, at least 85%, at least 90%, at least 95%, 99%, or 100% identical, to the amino acid sequence of SEQ ID NO: 37.

50. The composition of any one of claims 38 through 49, wherein the nucleic acid-guided nuclease further comprises at least one nuclear localization signal (NLS), at least one purification tag, and/or at least one cleavage site.

51. The composition of claim 50, wherein the nucleic acid-guided nuclease comprises at least 4 nuclear localization signals (NLS).

52. The composition of claim 51, wherein the nucleic acid-guided nuclease comprises one N-terminal and three C-terminal nuclease localization signals (NLS).

53. The composition of any one of claims 50 through 52, wherein the nuclear localization signals comprise any one of SEQ ID NOs: 40-56.

54. The composition of claim 32, wherein the NLS comprises SEQ ID NOs: 40, 51, and 56.

55. The composition of claim 38, wherein the guide nucleic acid comprises:
(i) a targeter nucleic acid comprising a targeter stem sequence and the spacer sequence; and
(ii) a modulator nucleic acid comprising a modulator stem sequence complementary to the targeter stem sequence, and, optionally, a 5′ sequence.

56. The composition of claim 55, wherein the guide nucleic acid comprises a single polynucleotide.

57. The composition of claim 55 or claim 56, wherein the guide nucleic acid comprises an engineered, non-naturally occurring guide nucleic acid.

58. The composition of claim 55 or claim 57, wherein the guide nucleic acid comprises a dual guide nucleic acid, wherein the targeter nucleic acid and the modulator nucleic acid are separate polynucleotides.

59. The composition of claim 58, wherein the dual guide nucleic acid is capable of binding to and activating a nucleic acid-guided nuclease, that, in a naturally occurring system, is activated by a single crRNA in the absence of a tracrRNA.

60. The composition of any one of claims 38 through 59, wherein the target nucleotide sequence is within at least 10, 20, 30, 40, or 50 nucleotides of a protospacer adjacent motif (PAM) that is recognized by the nucleic acid-guided nuclease.

61. The composition of any one of claims 38 through 60, wherein the guide nucleic acid and the nucleic acid-guided nuclease form a nucleic acid-guided nuclease complex.

62. The composition of claim 61, wherein the guide nucleic acid further comprises a donor template recruiting sequence.

63. The composition of claim 38 through 62, wherein the guide nucleic acid comprises a heterologous spacer sequence.

64. The composition of any one of claims 38 through 63, wherein the spacer sequence is at least 80%, at least 85%, at least 90%, at least 95%, at least 99.5%, or 100% identical to any one of any one of SEQ ID NOs: 125-2019.

65. The composition of any one of claims 38 through 64, wherein some or all of the guide nucleic acid comprises RNA.

66. The composition of claim 65, wherein at least 50%, at least 70%, at least 90%, at least 95%, or 100% of the guide nucleic acid comprises RNA.

67. The composition of any one of claims 38 through 66, wherein the guide nucleic acid comprises one or more chemical modifications to one or more nucleotides and/or internucleotide linkages at or near the 5′ end, at or near the 3′ end, and/or both.

68. The composition of claim 67, wherein the chemical modification comprises a 2′-O-alkyl, a 2′-O-methyl, a phosphorothioate, a phosphonoacetate, a thiophosphonoacetate, a 2′-O-methyl-3′-phosphorothioate, a 2′-O-methyl-3′-phosphonoacetate, a 2′-O-methyl-3′-thiophosphonoacetate, a 2′-deoxy-3′-phosphonoacetate, a 2′-deoxy-3′-thiophosphonoacetate, or a combination thereof.

69. The composition of any one of claims 38 through 68, further comprising one or more donor templates.

70. The composition of claim 69, wherein the donor template comprises single-stranded DNA, linear single-stranded RNA, linear double-stranded DNA, linear double-stranded RNA, circular single-stranded DNA, circular single-stranded RNA, circular double-stranded DNA, or circular double-stranded RNA.

71. The composition of claim 69 or claim 70, wherein the donor template comprises two homology arms.

72. The composition of claim 71, wherein the homology arms comprise at least 50, 100, 150, 200, 250, 300, 350, 400, 450, 500, 600, 700, 800, or 900 and/or at most 100, 150, 200, 250, 300, 350, 400, 450, 500, 600, 700, 800, 900, or 1000 nucleotides, for example 50-1000 nucleotides, preferably 100-800 nucleotides, more preferably 250-750 nucleotides, even more preferably 400-600 nucleotides.

73. The composition of any one of claims claim 69 through 72, wherein the donor template comprises a mutation in a PAM sequence to partially or completely abolish binding of the RNP to the DNA.

74. The composition of any one of claims 69 through 73, wherein the donor template comprises one or more promoters.

75. The composition of claim 74, wherein the promoter shares at least 70%, at least 75%, at least 80%, at least 85%, at least 90%, at least 95%, at least 99.5%, or 100% sequence identity with any one of SEQ ID NOs: 78-85.

76. The composition of any one of claims 69 through 75, wherein the donor template comprises one or more chemical modifications to one or more nucleotides and/or internucleotide linkages at or near the 5′ end, at or near the 3′ end, or both.

77. The composition of claim 76, wherein the chemical modification comprises a 2′-O-alkyl, a 2′-O-methyl, a phosphorothioate, a phosphonoacetate, a thiophosphonoacetate, a 2′-O-methyl-3′-phosphorothioate, a 2′-O-methyl-3′-phosphonoacetate, a 2′-O-methyl-3′-thiophosphonoacetate, a 2′-deoxy-3′-phosphonoacetate, a 2′-deoxy-3′-thiophosphonoacetate, a suitable alternative, or a combination thereof.

78. The composition of any one of claims 69 through 77, wherein the at least portion of the donor template is inserted by an innate cell repair mechanism.

79. The composition of claim 78, wherein the innate cell repair mechanism comprises homology directed repair (HDR).

80. A composition comprising a plurality of cell populations comprising:
(a) a first cell population comprising a plurality of the modified human cells of any one of claims 1 through 11; and
(b) a second cell population comprising a plurality of modified human cells wherein the second cell population does not comprise a modified human cell of the first population.

81. The composition of claim 80, wherein the first population of cells comprises at least 1, 2, 3, 4, 5, 6, 7, 8, 9, 10, 15, 20, 25, 30, 35, 40, 45, 50, 55, 60, 65, or 70% and/or not more than 2, 3, 4, 5, 6, 7, 8, 9, 10, 15, 20, 25, 30, 35, 40, 45, 50, 55, 60, 65, or 75% of all of the cells in the plurality of cell populations, for example 1-75% of all the cells in the plurality of cell populations, preferably 1-10%, more preferably 1-20%, even more preferably 1-30%, yet even more preferably 1-40%.

82. The composition of claim 80 or claim 81, wherein the second population of cells comprises at least 1, 2, 3, 4, 5, 6, 7, 8, 9, 10, 15, 20, 25, 30, 35, 40, 45, 50, 55, 60, 65, or 70% and/or no more than 2, 3, 4, 5, 6, 7, 8, 9, 10, 15, 20, 25, 30, 35, 40, 45, 50, 55, 60, 65, or 75% of all of the cells in the plurality of cell populations, for example 1-75% of all the cells in the plurality of cell populations, preferably 1-10%, more preferably 1-20%, even more preferably 1-30%, yet even more preferably 1-40%.

83. The composition of any one of claims 80 through 82, further comprising a third cell population wherein the third cell population does not contain a modified human cell of either the first or the second cell population.

84. The composition of claim 83, wherein the third population of cells comprises at least 1, 2, 3, 4, 5, 6, 7, 8, 9, 10, 15, 20, 25, 30, 35, 40, 45, 50, 55, 60, 65, or 70% and/or no more than 2, 3, 4, 5, 6, 7, 8, 9, 10, 15, 20, 25, 30, 35, 40, 45, 50, 55, 60, 65, or 75% of all of the cells in the plurality of cell populations, for example 1-75% of all the cells in the plurality of cell populations, preferably 1-10%, more preferably 1-20%, even more preferably 1-30%, yet even more preferably 1-40%.

85. The composition of any one of claims 80 through 84, further comprising a fourth cell population wherein the fourth cell population does not contain a modified human cell of either the first, second, or third cell population.

86. The composition of claim 85, wherein the fourth population of cells comprises at least 1, 2, 3, 4, 5, 6, 7, 8, 9, 10, 15, 20, 25, 30, 35, 40, 45, 50, 55, 60, 65, or 70% and/or no more than 2, 3, 4, 5, 6, 7, 8, 9, 10, 15, 20, 25, 30, 35, 40, 45, 50, 55, 60, 65, or 75% of all of the cells in the plurality of cell populations, for example 1-75% of all the cells in the plurality of cell populations, preferably 1-10%, more preferably 1-20%, even more preferably 1-30%, yet even more preferably 1-40%.

87. A composition comprising a plurality of cell populations comprising:
(a) a first cell population comprising a plurality of the modified human cells of any one of claims 4 through 11; and
(b) a second cell population comprising a plurality of modified human cells wherein the second cell population does not comprise a modified human cell of any one of claims 4 through 11.

88. The composition of claim 87 further comprising a third cell population wherein the third cell population does not contain a modified human cell of claim 4 through 11 or a modified human cell of the second cell population.

89. The composition of any one of claims 80 through 88, further comprising a pharmaceutically acceptable excipient.

90. A composition comprising a plurality of cell populations comprising:
(a) a first cell population comprising a plurality of cells wherein each cell comprises:
(i) a first genomic modification whereby a first gene that codes for a subunit of a TCR is partially or completely inactivated;
(ii) a second genomic modification whereby a second gene that codes for a subunit of an HLA-1 protein is partially or completely inactivated;
(iii) a third genomic modification whereby a third gene that codes for a subunit of an HLA-2 protein or that codes for a transcription factor for one or more subunits of an HLA-2 protein is partially or completely inactivated; and
(b) a second cell population, different from the first, wherein the second cell population comprises a plurality of cells that do not comprise one or more of genomic modifications of (i) through (iii), wherein each cell of the second population comprises the same genomic modifications.

91. The composition of claim 90, wherein the first cell population comprises at least 1, 2, 3, 4, 5, 6, 7, 8, 9, 10, 15, 20, 25, 30, 35, 40, 45, 50, 55, 60, 65, or 70% and/or no more than 2, 3, 4, 5, 6, 7, 8, 9, 10, 15, 20, 25, 30, 35, 40, 45, 50, 55, 60, 65, or 75% of all of the cells in the plurality of cell populations, for example 1-75% of all the cells in the plurality of cell populations, preferably 1-10%, more preferably 1-20%, even more preferably 1-30%, yet even more preferably 1-40%.

92. The composition of claim 90 or claim 91, wherein the second cell population comprises at least 1, 2, 3, 4, 5, 6, 7, 8, 9, 10, 15, 20, 25, 30, 35, 40, 45, 50, 55, 60, 65, or 70% and/or no more than 2, 3, 4, 5, 6, 7, 8, 9, 10, 15, 20, 25, 30, 35, 40, 45, 50, 55, 60, 65, or 75% of all of the cells in the plurality of cell populations, for example 1-75% of all the cells in the plurality of cell populations, preferably 1-10%, more preferably 1-20%, even more preferably 1-30%, yet even more preferably 1-40%.

93. The composition of any one of claims 90 through 92, wherein the first cell population further comprises:
(iv) a fourth genomic modification comprising a first portion of a polynucleotide, wherein the first portion codes for a first chimeric antigen receptor (CAR) or portion thereof, inserted into the first gene coding for a subunit of the T cell receptor (TCR) or into a safe harbor site, whereby the first CAR or portion thereof is expressed.

94. The composition of claim 93, wherein the subunit of a TCR protein comprises an alpha subunit or a beta subunit or a TRAC, TRBC, CD3E, CD3D, CD3G, or CD3Z gene.

95. The composition of claim 94, wherein the subunit of a TCR protein is an alpha 95. subunit.

96. The composition of claim 95, wherein the gene coding for the subunit of a TCR protein is a TRAC gene.

97. The composition of claim 90 or claim 96, wherein the first cell population further comprises:
(v) a fifth genomic modification comprising a polynucleotide coding for a fusion protein of B2M and a subunit of an HLA-1 protein inserted into a site within the second gene or a safe harbor site, whereby the fusion protein is expressed.

98. The composition of claim 97, wherein the first subunit comprises B2M.

99. The composition of claim 97 or claim 98, wherein the subunit of an HLA-1 protein comprises HLA-C, HLA-E, or HLA-G.

100. The composition of claim 99, wherein the subunit of an HLA-1 protein comprises HLA-E or HLA-G.

101. The composition of claim 99, wherein the subunit of an HLA-1 protein comprises HLA-E.

102. The composition of claim 99, wherein the subunit of an HLA-1 protein comprises HLA-G.

103. The composition of any one of claims 90 through 102, further comprising a third cell population wherein the third cell population does not contain a modified human cell of either the first or the second cell population.

104. The composition of claim 103, wherein the third cell population comprises at least 1, 2, 3, 4, 5, 6, 7, 8, 9, 10, 15, 20, 25, 30, 35, 40, 45, 50, 55, 60, 65, or 70% and/or no more than 2, 3, 4, 5, 6, 7, 8, 9, 10, 15, 20, 25, 30, 35, 40, 45, 50, 55, 60, 65, or 75% of all of the cells in the plurality of cell populations, for example 1-75% of all the cells in the plurality of cell populations, preferably 1-10%, more preferably 1-20%, even more preferably 1-30%, yet even more preferably 1-40%.

105. The composition of any one of claims 90 through 104, further comprising a fourth cell population wherein the fourth cell population does not contain a modified human cell of either the first, second, or third cell population.

106. The composition of claim 105, wherein the cell population comprises at least 1, 2, 3, 4, 5, 6, 7, 8, 9, 10, 15, 20, 25, 30, 35, 40, 45, 50, 55, 60, 65, or 70% and/or no more than 2, 3, 4, 5, 6, 7, 8, 9, 10, 15, 20, 25, 30, 35, 40, 45, 50, 55, 60, 65, or 75% of all of the cells in the plurality of cell populations, for example 1-75% of all the cells in the plurality of cell populations, preferably 1-10%, more preferably 1-20%, even more preferably 1-30%, yet even more preferably 1-40%.

107. The composition of any one of claims 90 to 106, wherein the cell populations comprise immune cells or stem cells.

108. The composition of claim 107, wherein the cell populations comprise immune cells comprising neutrophils, eosinophils, basophils, mast cells, monocytes, macrophages, dendritic cells, natural killer cells, or a lymphocytes.

109. The composition of claim 107, wherein the cell populations comprise immune cells comprising T cells.

110. The composition of claim 107, wherein the cell populations comprise stem cells comprising human pluripotent stem cells, multipotent stem cells, embryonic stem cells, induced pluripotent stem cells (iPSC), hematopoietic stem cells, or a CD34+ cells.

111. The composition of claim 107, wherein the cell populations comprise stem cells comprising induced pluripotent stem cells (iPSC).

112. A composition comprising a cell comprising a first nucleic acid-guided nuclease system comprising
(a) a first nucleic acid-guided nuclease comprising a Type V CRISPR endonuclease; and
(b) a first guide nucleic acid, compatible with the first nucleic acid-guided nuclease, comprising a spacer sequence directed at a first target nucleotide sequence in a gene coding for a first subunit of an HLA-1 protein;
wherein the first nucleic acid-guided nuclease and the first guide nucleic acid, when complexed, target and cleave at least one strand of DNA at a site at or near the first target nucleotide sequence in the gene coding for the first subunit of an HLA-1 protein.

113. The composition of claim 112, wherein the first subunit comprises B2M.

114. The composition of claim 112, wherein the cell further comprises a first donor template comprising a polynucleotide coding for a fusion protein comprising B2M and a second subunit of an HLA-1 protein.

115. The composition of claim 114, wherein the second subunit of an HLA-1 protein comprises HLA-C, HLA-E, or HLA-G.

116. The composition of claim 114, wherein the second subunit of an HLA-1 protein comprises HLA-E or HLA-G.

117. The composition of claim 114, wherein the second subunit of an HLA-1 protein comprises HLA-E.

118. The composition of claim 114, wherein the second subunit of an HLA-1 protein comprises HLA-G.

119. The composition of any one of claims 112 to 118, wherein the cell further comprises a second nucleic acid-guided nuclease system comprising
(c) a second nucleic acid-guided nuclease comprising a Type V CRISPR endonuclease; and
(d) a second guide nucleic acid, compatible with the second nucleic acid-guided nuclease, comprising a spacer sequence directed at a second target nucleotide sequence in a gene coding for a subunit of an HLA-2 protein or a transcription factor regulating the expression of one or more subunits of an HLA-2 protein;
wherein the second nucleic acid-guided nuclease and the second guide nucleic acid, when complexed, target and cleave at least one strand of DNA at a site at or near the second target nucleotide sequence in the gene coding for a subunit of an HLA-2 protein or a transcription factor regulating the expression of one or more subunits of an HLA-2 protein.

120. The composition of claim 119, wherein the transcription factor comprises CIITA.

121. The composition of any one of claims 112 to 120, wherein the cell further comprises a third nucleic acid-guided nuclease system comprising
(e) a third nucleic acid-guided nuclease comprising a Type V CRISPR endonuclease; and
(f) a third guide nucleic acid, compatible with the third nucleic acid-guided nuclease, comprising a spacer sequence directed at a third target nucleotide sequence in a gene coding for a subunit of a TCR protein;
wherein the third nucleic acid-guided nuclease and the third guide nucleic acid, when complexed, target and cleave at least one strand of DNA at a site at or near the third target nucleotide sequence in the gene coding for the subunit of a TCR protein.

122. The composition of claim 121, wherein the subunit of a TCR protein comprises an alpha subunit or a beta subunit or a TRAC, TRBC, CD3E, CD3D, CD3G, or CD3Z gene.

123. The composition of claim 122, wherein the subunit of a TCR protein is an alpha subunit.

124. The composition of claim 121, wherein the gene coding for the subunit of a TCR protein is a TRAC gene.

125. The composition of any one of claims 121 through 124, wherein the cell further comprises a donor template comprising a polynucleotide coding for a first chimeric antigen receptor (CAR) or portion thereof.

126. The composition of claim 125, wherein the CAR or portion thereof comprises a polypeptide that binds at least one of B7H3, BCMA, GPRC5D, CD8, CD8a, CD19, CD20, CD22, CD28, 4-1BB, or CD3zeta.

127. The composition of claim 126, wherein the CAR or portion thereof comprises a polypeptide at least 60, at least 70, at least 80, at least 90, at least 95, at least 99%, or 100% identical to any one of the amino acid sequences of SEQ ID NOs: 86-124.

128. The composition of claim 125, wherein the CAR or portion thereof comprises a polypeptide that binds at least one of B7H3, BCMxA, GPRC5D, CD8, CD8a, CD20, CD22, CD28, 4-1BB, or CD3zeta.

129. The composition of claim 128, wherein the CAR or portion thereof comprises a polypeptide at least 60, at least 70, at least 80, at least 90, at least 95, at least 99%, or 100% identical to any one of the amino acid sequences of SEQ ID NOs: 86-104 or 116-124.

130. A composition comprising a cell comprising a first nucleic acid-guided nuclease system comprising
(a) a first nucleic acid-guided nuclease comprising a Type V CRISPR endonuclease; and
(b) a first guide nucleic acid, compatible with the first nucleic acid-guided nuclease, comprising a spacer sequence directed at a first target nucleotide sequence in a gene coding for a subunit of an HLA-2 protein, or to a transcription factor regulating expression of one or more genes coding for one or more subunits of HLA-2 proteins;
wherein the first nucleic acid-guided nuclease and the first guide nucleic acid, when complexed, target and cleave at least one strand of DNA at a site at or near the first target nucleotide sequence in the gene coding for a subunit of an HLA-2 protein, or to a transcription factor regulating expression of one or more genes coding for one or more subunits of HLA-2 proteins.

131. The composition of claim 130, wherein the transcription factor comprises CIITA.

132. The composition of claim 130 or 131, wherein the cell further comprises a second nucleic acid-guided nuclease system comprising
(c) a second nucleic acid-guided nuclease comprising a Type V CRISPR endonuclease; and
(d) a second guide nucleic acid, compatible with the second nucleic acid-guided nuclease, comprising a spacer sequence directed at a second target nucleotide sequence in a gene coding for a subunit of a TCR protein;
wherein the second nucleic acid-guided nuclease and the second guide nucleic acid, when complexed, target and cleave at least one strand of DNA at a site at or near the second target nucleotide sequence in the gene coding for the subunit of a TCR protein.

133. The composition of claim 132, wherein the subunit of a TCR protein comprises an alpha subunit or a beta subunit or a TRAC, TRBC, CD3E, CD3D, CD3G, or CD3Z gene.

134. The composition of claim 133, wherein the subunit of a TCR protein is an alpha subunit.

135. The composition of claim 132, wherein the gene coding for the subunit of a TCR protein is a TRAC gene.

136. The composition of any one of claims 132 through 135, wherein the cell further comprises a donor template comprising a polynucleotide coding for a first chimeric antigen receptor (CAR) or portion thereof.

137. The composition of claim 136, wherein the CAR or portion thereof comprises a polypeptide that binds at least one of B7H3, BCMA, GPRC5D, CD8, CD8a, CD19, CD20, CD22, CD28, 4-1BB, or CD3zeta.

138. The composition of claim 137, wherein the CAR or portion thereof comprises a polypeptide at least 60, at least 70, at least 80, at least 90, at least 95, at least 99%, or 100% identical to any one of the amino acid sequences of SEQ ID NOs: 86-124.

139. The composition of claim 136, wherein the CAR or portion thereof comprises a polypeptide that binds at least one of B7H3, BCMxA, GPRC5D, CD8, CD8a, CD20, CD22, CD28, 4-1BB, or CD3zeta.

140. The composition of claim 139, wherein the CAR or portion thereof comprises a polypeptide at least 60, at least 70, at least 80, at least 90, at least 95, at least 99%, or 100% identical to any one of the amino acid sequences of SEQ ID NOs: 86-104 or 116-124.

141. A composition comprising a cell comprising a first nucleic acid-guided nuclease system comprising
(a) a first nucleic acid-guided nuclease comprising a Type V CRISPR endonuclease; and
(b) a first guide nucleic acid, compatible with the nucleic acid-guided nuclease, comprising a spacer sequence directed at a first target nucleotide sequence in a gene coding for a subunit of a TCR protein;
wherein the first nucleic acid-guided nuclease and the first guide nucleic acid, when complexed, target and cleave at least one strand of DNA at a site at or near the first target nucleotide sequence in the gene coding for the subunit of a TCR protein.

142. The composition of claim 141, wherein the subunit of a TCR protein comprises an alpha subunit or a beta subunit or a TRAC, TRBC, CD3E, CD3D, CD3G, or CD3Z gene.

143. The composition of claim 142, wherein the subunit of a TCR protein is an alpha subunit.

144. The composition of any one of claim 141, wherein the gene coding for the subunit of a TCR protein is a TRAC gene.

145. The composition of any one of claims 141 through 144, wherein the cell further comprises a donor template comprising a polynucleotide coding for a first chimeric antigen receptor (CAR) or portion thereof.

146. The composition of claim 145, wherein the CAR or portion thereof comprises a polypeptide that binds at least one of B7H3, BCMA, GPRC5D, CD8, CD8a, CD19, CD20, CD22, CD28, 4-1BB, or CD3zeta.

147. The composition of claim 146, wherein the CAR or portion thereof comprises a polypeptide at least 60, at least 70, at least 80, at least 90, at least 95, at least 99%, or 100% identical to any one of the amino acid sequences of SEQ ID NOs: 86-124.

148. The composition of claim 145, wherein the CAR or portion thereof comprises a polypeptide that binds at least one of B7H3, BCMxA, GPRC5D, CD8, CD8a, CD20, CD22, CD28, 4-1BB, or CD3zeta.

149. The composition of claim 148, wherein the CAR or portion thereof comprises a polypeptide at least 60, at least 70, at least 80, at least 90, at least 95, at least 99%, or 100% identical to any one of the amino acid sequences of SEQ ID NOs: 86-104 or 116-124.

150. The composition of any one of claims 112 to 149, wherein the nucleic acid-guided nuclease comprises an engineered, non-naturally occurring nuclease.

151. The composition of any one of claims 112 to 150, wherein the nucleic acid-guided nuclease comprises a Class 1 or a Class 2 nuclease.

152. The composition of claim 151, wherein the nucleic acid-guided nuclease comprises a Type II or a Type V nuclease.

153. The composition of claim 152, wherein the nucleic acid-guided nuclease comprises a Type V-A, V-B, V-C, V-D, or V-E nuclease.

154. The composition of claim 153, wherein the nucleic acid-guided nuclease comprises a Type V-A nuclease.

155. The composition of claim 154, wherein the nucleic acid-guided nuclease comprises a MAD nuclease, an ART nuclease, or an ABW nuclease.

156. The composition of claim 155, wherein the nucleic acid-guided nuclease comprises an amino acid sequence at least 80%, at least 85%, at least 90%, at least 95%, at least 99%, or 100% identical to an amino acid sequence of a MAD, ART, or ABW nuclease.

157. The composition of claim 155, wherein the nucleic acid-guided nuclease comprises a MAD1, MAD2, MAD3, MAD4, MAD5, MAD6, MAD7, MAD8, MAD9, MAD10, MAD11, MAD12, MAD13, MAD14, MAD15, MAD16, MAD17, MAD18, MAD19, or MAD20 nuclease.

158. The composition of claim 155, wherein the nucleic acid-guided nuclease comprises an ART1, ART2, ART3, ART4, ART5, ART6, ART7, ART8, ART9, ART10, ART11, ART11*, ART12, ART13, ART14, ART15, ART16, ART17, ART18, ART19, ART20, ART21, ART22, ART23, ART24, ART25, ART26, ART27, ART28, ART29, ART30, ART31, ART32, ART33, ART34, or ART35 nuclease.

159. The composition of claim 155, wherein the nucleic acid-guided nuclease comprises an amino acid sequence at least 80%, at least 85%, at least 90%, at least 95%, at least 99%, or 100% identical, to the amino acid sequence of MAD2, MAD7, ART2, ART11, or ART11*.

160. The composition of claim 155, wherein the nucleic acid-guided nuclease comprises an amino acid sequence that is at least 80%, at least 85%, at least 90%, at least 95%, 99%, or 100% identical, to the amino acid sequence of SEQ ID NO: 37.

161. The composition of any one of claims 150 to 160, wherein the nucleic acid-guided nuclease further comprises at least one nuclear localization signal (NLS), at least one purification tag, and/or at least one cleavage site.

162. The composition of claim 161, wherein the nucleic acid-guided nuclease comprises at least 4 nuclear localization signals (NLS).

163. The composition of claim 162, wherein the nucleic acid-guided nuclease comprises one N-terminal and three C-terminal nuclease localization signals (NLS).

164. The composition of claim 161 through 163, wherein the nuclear localization signals comprise any one of SEQ ID NOs: 40-56.

165. The composition of claim 164, wherein the NLS comprises SEQ ID NOs: 40, 51, and 56.

166. The composition of any one of claims 112 to 165, wherein the guide nucleic acid comprises:
(i) a targeter nucleic acid comprising a targeter stem sequence and the spacer sequence; and
(ii) a modulator nucleic acid comprising a modulator stem sequence complementary to the targeter stem sequence, and, optionally, a 5′ sequence.

167. The composition of claim 166, wherein the guide nucleic acid comprises a single polynucleotide.

168. The composition of claim 166 or claim 167, wherein the guide nucleic acid comprises an engineered, non-naturally occurring guide nucleic acid.

169. The composition of claim 166 or claim 168, wherein the targeter nucleic acid and the modulator nucleic acid are separate polynucleotides.

170. The composition of claim 169, wherein the dual guide nucleic acid is capable of binding to and activating a nucleic acid-guided nuclease, that, in a naturally occurring system, is activated by a single crRNA in the absence of a tracrRNA.

171. The composition of any one of claims 112 through 170, wherein the guide nucleic acid further comprises a donor template recruiting sequence.

172. The composition of any one of claims 112 through 171, wherein the target nucleotide sequence is within at least 10, 20, 30, 40, or 50 nucleotides of a protospacer adjacent motif (PAM) that is recognized by the nucleic acid-guided nuclease.

173. The composition of any one of claims 166 through 172, wherein the guide nucleic acid comprises a spacer sequence at least 80%, at least 85%, at least 90%, at least 95%, at least 99.5%, or 100% identical to any one of any one of SEQ ID NOs: 125-2019.

174. The composition of any one of claims 112 through 173, wherein some or all of the guide nucleic acid comprises RNA.

175. The composition of claim 174, wherein at least 50%, at least 70%, at least 90%, at least 95%, or 100% of the guide nucleic acid comprises RNA.

176. The composition of any one of claims 112 through 175, wherein the guide nucleic acid comprises one or more chemical modifications to one or more nucleotides and/or internucleotide linkages at or near the 5′ end, at or near the 3′ end, and/or both.

177. The composition of claim 176, wherein the chemical modification comprises a 2′-O-alkyl, a 2′-O-methyl, a phosphorothioate, a phosphonoacetate, a thiophosphonoacetate, a 2′-O-methyl-3′-phosphorothioate, a 2′-O-methyl-3′-phosphonoacetate, a 2′-O-methyl-3′-thiophosphonoacetate, a 2′-deoxy-3′-phosphonoacetate, a 2′-deoxy-3′-thiophosphonoacetate, or a combination thereof.

178. The composition of any one of claims 112 through 177, wherein the donor template comprises single-stranded DNA, linear single-stranded RNA, linear double-stranded DNA, linear double-stranded RNA, circular single-stranded DNA, circular single-stranded RNA, circular double-stranded DNA, or circular double-stranded RNA.

179. The composition of any one of claims 114 through 118, 125 through 129, 136 through 140, or 145 through 149, wherein the donor template comprises two homology arms.

180. The composition of claim 179, wherein the homology arms comprise at least 50, 100, 150, 200, 250, 300, 350, 400, 450, 500, 600, 700, 800, or 900 and/or at most 100, 150, 200, 250, 300, 350, 400, 450, 500, 600, 700, 800, 900, or 1000 nucleotides, for example 50-1000 nucleotides, preferably 100-800 nucleotides, more preferably 250-750 nucleotides, even more preferably 400-600 nucleotides.

181. The composition of any one of claims 114 through 118, 125 through 129, 136 through 140, or 145 through 149, wherein the donor template comprises a mutation in a PAM sequence to partially or completely abolish binding of the RNP to the DNA.

182. The composition of any one of claims 114 through 118, 125 through 129, 136 through 140, or 145 through 149, wherein the donor template comprises one or more promoters.

183. The composition of claim 182, wherein the promoter shares at least 70%, at least 75%, at least 80%, at least 85%, at least 90%, at least 95%, at least 99.5%, or 100% sequence identity with any one of SEQ ID NOs: 78-85.

184. The composition of any one of claims 114 through 118, 125 through 129, 136 through 140, or 145 through 149, wherein the donor template comprises one or more chemical modifications to one or more nucleotides and/or internucleotide linkages at or near the 5′ end, at or near the 3′ end, or both.

185. The composition of claim 184, wherein the chemical modification comprises a 2′-O-alkyl, a 2′-O-methyl, a phosphorothioate, a phosphonoacetate, a thiophosphonoacetate, a 2′-O-methyl-3′-phosphorothioate, a 2′-O-methyl-3′-phosphonoacetate, a 2′-O-methyl-3′-thiophosphonoacetate, a 2′-deoxy-3′-phosphonoacetate, a 2′-deoxy-3′-thiophosphonoacetate, a suitable alternative, or a combination thereof.

186. The composition of any one of claims 112 through 185, wherein the cell comprises an immune cell or a stem cell.

187. The composition of claim 186, wherein the cell comprises an immune cell comprising a neutrophil, eosinophil, basophil, mast cell, monocyte, macrophage, dendritic cell, natural killer cell, or a lymphocyte.

188. The composition of claim 186, wherein the cell comprises a T cell.

189. The composition of claim 186, wherein the cell comprises a stem cell comprising a human pluripotent, multipotent stem cell, embryonic stem cell, induced pluripotent stem cell, hematopoietic stem cell, or a CD34+ cell.

190. The composition of claim 186, wherein the cell comprises a stem cell comprising an iPSC.

191. A composition comprising (a) a first guide nucleic acid comprising a spacer sequence complementary to a target nucleotide sequence within a B2M gene;
(b) a second guide nucleic acid comprising a spacer sequence complementary to a target nucleotide sequence within a CIITA gene;
(c) a third guide nucleic acid comprising a spacer sequence complementary to a target nucleotide sequence within a TCR subunit gene; and
(d) one or more nucleic acid-guided nucleases optionally complexed with one or more of the guide nucleic acids of (a), (b), or (c).

192. The composition of claim 191, wherein the gene coding for a subunit of a TCR is a TRAC gene or a TRAC, TRBC, CD3E, CD3D, CD3G, or CD3Z gene.

193. The composition of claim 191 or 192, wherein the one or more nucleic acid-guided nucleases comprise Class 1 or a Class 2 nucleases.

194. The composition of claim 193, wherein the one or more nucleic acid-guided nucleases comprise Type II or a Type V nuclease.

195. The composition of claim 193, wherein the one or more nucleic acid-guided nucleases comprise Type V-A, V-B, V-C, V-D, or V-E nucleases.

196. The composition of claim 193, wherein the one or more nucleic acid-guided nucleases comprise Type V-A nucleases.

197. The composition of claim 193, wherein the one or more nucleic acid-guided nucleases comprise a MAD nuclease, an ART nuclease, or an ABW nuclease.

198. The composition of claim 193, wherein the one or more nucleic acid-guided nucleases each comprise an amino acid sequence at least 80%, at least 85%, at least 90%, at least 95%, or at least 99% identical to the amino acid sequence of MAD, ART, or ABW nuclease.

199. The composition of claim 193, wherein the one or more nucleic acid-guided nucleases each comprise a MAD1, MAD2, MAD3, MAD4, MAD5, MAD6, MAD7, MAD8, MAD9, MAD10, MAD11, MAD12, MAD13, MAD14, MAD15, MAD16, MAD17, MAD18, MAD19, or MAD20 nuclease.

200. The composition of claim 193, wherein the one or more nucleic acid-guided nucleases each comprise an ART1, ART2, ART3, ART4, ART5, ART6, ART7, ART8, ART9, ART10, ART11, ART11*, ART12, ART13, ART14, ART15, ART16, ART17, ART18, ART19, ART20, ART21, ART22, ART23, ART24, ART25, ART26, ART27, ART28, ART29, ART30, ART31, ART32, ART33, ART34, or ART35 nuclease.

201. The composition of claim 193, wherein the one or nucleic acid-guided nucleases each comprise an amino acid sequence at least 80%, at least 85%, at least 90%, at least 95%, or at least 99% identical to the amino acid sequence of MAD2, MAD7, ART2, ART11, or ART11*.

202. The composition of any one of claims 191 through 201, wherein the first, second, and/or third guide nucleic acids comprise:
(i) a targeter nucleic acid comprising a targeter stem sequence and a spacer sequence; and
(ii) a modulator nucleic acid comprising a modulator stem sequence complementary to the targeter stem sequence, and, optionally, a 5′ sequence.

203. The composition of claim 202, wherein the targeter nucleic acid and the modulator nucleic acid comprise a single polynucleotide.

204. The composition of claim 202 or claim 203, wherein the guide nucleic acid comprises an engineered, non-naturally occurring guide nucleic acid.

205. The composition of claim 202 or claim 204, wherein the guide nucleic acid comprises a dual guide nucleic acid, wherein the targeter nucleic acid and the modulator nucleic acid are separate polynucleotides.

206. The composition of claim 205, wherein the dual guide nucleic acid is capable of binding to and activating a nucleic acid-guided nuclease, that, in a naturally occurring system, is activated by a single crRNA in the absence of a tracrRNA.

207. The composition of any one of claims 202 through 206, wherein the target nucleotide sequence is within at least 10, 20, 30, 40, or 50 nucleotides of a protospacer adjacent motif (PAM) that is recognized by the nucleic acid-guided nuclease.

208. The composition of any one of claims 202 through 207, wherein the guide nucleic acid further comprises a donor template recruiting sequence.

209. The composition of any one of claims 202 through 208, wherein the guide nucleic acid comprises a spacer sequence is at least 80%, at least 85%, at least 90%, at least 95%, at least 99.5%, or 100% identical to any one of any one of SEQ ID NOs: 125-2019.

210. The composition of any one of claims 202 through 209, wherein some or all of the guide nucleic acid is RNA.

211. The composition of claim 210, wherein at least 50%, at least 70%, at least 90%, at least 95%, or 100% of the guide nucleic acid comprises RNA.

212. The composition of any one of claims 202 through 211, wherein the guide nucleic acid comprises one or more chemical modifications to one or more nucleotides and/or internucleotide linkages at or near the 5′ end, at or near the 3′ end, and/or both.

213. The composition of claim 212, wherein the chemical modification comprises a 2′-O-alkyl, a 2′-O-methyl, a phosphorothioate, a phosphonoacetate, a thiophosphonoacetate, a 2′-O-methyl-3′-phosphorothioate, a 2′-O-methyl-3′-phosphonoacetate, a 2′-O-methyl-3′-thiophosphonoacetate, a 2′-deoxy-3′-phosphonoacetate, a 2′-deoxy-3′-thiophosphonoacetate, a suitable alternative, or a combination thereof.

214. The composition of any one of claims 191 to 213, further comprising:
(c) a first donor template comprising a first transgene.

215. The composition of claim 214, wherein the first transgene comprises a polynucleotide encoding a fusion protein comprising B2M and HLA-A, -B, -C, -D, -E, -F, or -G.

216. The composition of claim 215, wherein the fusion protein comprises HLA-C, -E, or -G.

217. The composition of claim 216, wherein the fusion protein comprises HLA-E or HLA-G.

218. The composition of claim 217, wherein the fusion protein comprises HLA-E.

219. The composition of claim 217, wherein the fusion protein comprises HLA-G.

220. The composition of any one of claims 214 to 219, wherein the first donor template comprises homology arms, wherein the first homology arm is complementary to a region upstream and the second homology arm is complementary to a region downstream of a cleavage site within a B2M gene.

221. The composition of any one of claims 191 through 220, further comprising (f) a second donor template comprising a second transgene.

222. The composition of claim 221, wherein the second transgene comprises a first portion of a polynucleotide coding for a first chimeric antigen receptor (CAR).

223. The composition of claim 222, wherein the CAR or portion thereof comprises a polypeptide that binds at least one of B7H3, BCMA, GPRC5D, CD8, CD8a, CD19, CD20, CD22, CD28, 4-1BB, or CD3zeta.

224. The composition of claim 223, wherein the CAR or portion thereof comprises a polypeptide at least 60, at least 70, at least 80, at least 90, at least 95, at least 99%, or 100% identical to any one of the amino acid sequences of SEQ ID NOs: 86-124.

225. The composition of claim 221, wherein the CAR or portion thereof comprises a polypeptide that binds at least one of B7H3, BCMA, GPRC5D, CD8, CD8a, CD20, CD22, CD28, 4-1BB, or CD3zeta.

226. The composition of claim 225, wherein the CAR or portion thereof comprises a polypeptide at least 60, at least 70, at least 80, at least 90, at least 95, at least 99%, or 100% identical to any one of the amino acid sequences of SEQ ID NOs: 86-104 or 116-124.

227. The composition of any one of claims 222 through 226, further comprising a second portion of the polynucleotide, wherein the second portion codes for a second CAR or portion thereof, different from the first CAR or portion thereof.

228. The composition of any one of claims 221 to 227, wherein the second donor template comprises homology arms, wherein the first homology arm is complementary to a region upstream and the second homology arm is complementary to a region downstream of a cleavage site within a TRC subunit gene.

229. The composition of any one of claims 191 through 228, further comprising (g) a third donor template comprising a third transgene.

230. The composition of any one of claims 214 to 229, wherein the donor template comprises single-stranded DNA, linear single-stranded RNA, linear double-stranded DNA, linear double-stranded RNA, circular single-stranded DNA, circular single-stranded RNA, circular double-stranded DNA, or circular double-stranded RNA.

231. The composition of any one of claims 214 to 230, wherein the donor template comprises a mutation in a PAM sequence to partially or completely abolish binding of the RNP to the DNA.

232. The composition of any one of claims 214 to 231, wherein the donor template comprises one or more promoters.

233. The composition of claim 232, wherein the promoter shares at least 70%, at least 75%, at least 80%, at least 85%, at least 90%, at least 95%, at least 99.5% sequence identity with any one of SEQ ID NOs: 78-85.

234. The composition of any one of claims 214 to 233, wherein the donor template comprises one or more chemical modifications to one or more nucleotides and/or internucleotide linkages at or near the 5′ end, at or near the 3′ end, or both.

235. The composition of claim 234, wherein the chemical modification comprises a 2′-O-alkyl, a 2′-O-methyl, a phosphorothioate, a phosphonoacetate, a thiophosphonoacetate, a 2′-O-methyl-3′-phosphorothioate, a 2′-O-methyl-3′-phosphonoacetate, a 2′-O-methyl-3′-thiophosphonoacetate, a 2′-deoxy-3′-phosphonoacetate, a 2′-deoxy-3′-thiophosphonoacetate, a suitable alternative, or a combination thereof.

236. A modified cell that
(a) partially or completely lacks cell surface-expressed
(i) active HLA-1 protein;
(ii) active HLA-2 protein; or
(iii) active TCR protein; and
(b) comprises one or more
(i) CAR proteins expressed on the cell surface; and
(ii) fusion proteins comprising HLA-E or HLA-G expressed on the cell surface.

237. The modified cell of 236, wherein the cell comprises a human cell.

238. The modified cell of 237, wherein the human cell comprises an immune cell or a stem cell.

239. The modified cell of 238, wherein the immune cell comprises a neutrophil, eosinophil, basophil, mast cell, monocyte, macrophage, dendritic cell, natural killer cell, or a lymphocyte.

240. The modified cell of 238, wherein the immune cell comprises a T cell.

241. The modified cell of 238, wherein the stem cell comprises a human pluripotent, multipotent stem cell, embryonic stem cell, induced pluripotent stem cell, hematopoietic stem cell, CD34+ cell.

242. A human cell comprising:
(a) a first, and optionally a second and/or third nucleic acid-guided nuclease, wherein at least one of the nucleases comprises a CRISPR endonuclease; and
(b) at least one of
(i) a first guide nucleic acid directed at a first target nucleotide sequence in a gene coding for a subunit of an HLA-1 protein;
(ii) a second guide nucleic acid directed at a second target nucleotide sequence in a gene coding for a subunit of an HLA-2 protein or a transcription factor for one or more genes coding for a subunit of an HLA-2 protein; and
(iii) a third guide nucleic acid directed at a third target nucleotide sequence coding for a subunit of a TCR.

243. The human cell of claim 242, further comprising:
(c) a donor template comprising a polynucleotide coding for a chimeric antigen receptor (CAR) protein or part of a CAR.

244. The human cell of claim 243, wherein the protein comprises a protein directed at B7H3, BCMA, GPRC5D, CD19, CD20, CD22, or a combination thereof.

245. The human cell of claim 244, wherein the CAR or portion thereof comprises a polypeptide at least 60, at least 70, at least 80, at least 90, at least 95, at least 99%, or 100% identical to any one of the amino acid sequences of SEQ ID NOs: 86-124.

246. The human cell of any one of claims 243 through 245, wherein the donor template comprises homology arms for insertion at a cleavage site in the subunit of the TCR to which the guide nucleic acid is directed.

247. The human cell of any one of claims 242 to 243, further comprising:
(d) a donor template comprising a polynucleotide coding an HLA-A, HLA-B, HLA-C, HLA-D, HLA-E, HLA-F, or HLA-G protein.

248. The human cell of any one of claims 242 to 247, wherein the human cell comprises an immune cell or a stem cell.

249. The human cell of claim 248, wherein the human cell comprises an immune cell comprising a neutrophil, eosinophil, basophil, mast cell, monocyte, macrophage, dendritic cell, natural killer cell, or a lymphocyte.

250. The human cell of claim 248, wherein the human cell comprises an immune cell comprising a T cell.

251. The human cell of claim 248, wherein human cell comprises a stem cell comprising a human pluripotent, multipotent stem cell, embryonic stem cell, induced pluripotent stem cell, hematopoietic stem cell, CD34+ cell.

252. The human cell of claim 251, wherein human cell comprises a stem cell comprising an induced pluripotent stem cell.

253. A modified human cell comprising (a) reduced or eliminated B2M and knock-in of HLA-E or HLA-G; or
(b) reduced or eliminated TCR and knock-in.

254. The modified human cell of claim 253, wherein the human cell comprises an immune cell or a stem cell.

255. The modified human cell of 254, wherein the human cell comprises an immune cell comprising a neutrophil, eosinophil, basophil, mast cell, monocyte, macrophage, dendritic cell, natural killer cell, or a lymphocyte.

256. The modified human cell of 254, wherein the human cell comprises an immune cell comprising a T cell.

257. The modified human cell of 254, wherein the human cell comprises a stem cell comprising a human pluripotent, multipotent stem cell, embryonic stem cell, induced pluripotent stem cell, hematopoietic stem cell, CD34+ cell.

258. The modified human cell of 254, wherein the human cell comprises an induced pluripotent stem cell.

259. A human stem cell comprising:
(a) a first genomic modification in an endogenous B2M gene that partially or completely eliminates expression of the endogenous B2M;
(b) a second genomic modification in a CIITA gene that partially or completely eliminates expression of the CIITA; and
(c) a third genomic modification in a TCR subunit gene that partially or completely eliminates expression of the TCR subunit.

260. The human stem cell of claim 259, wherein the cell comprises an iPSC.

261. The human stem cell of claim 259 or 260, further comprising:
(d) an exogenous polynucleotide encoding for a fusion protein comprising one or more HLA-A, -B, -C, -D, -E, -F, or -G protein inserted into the B2M gene.

262. The human stem cell of any of claims 259 to 261, further comprising
(e) an exogenous polynucleotide encoding for one or more CARs inserted into the TCR subunit gene.

263. The human stem cell of claim 262, wherein the CAR or portion thereof comprises a polypeptide that binds at least one of BCMA, GPRC5D, CD8, CD8a, CD19, CD20, CD22, CD28, 4-1BB, or CD3zeta.

264. A method for treating a disorder comprising administering to an individual suffering from a disorder an effective amount of a composition comprising a composition of any one of the claims 1 through 190 or 236 through 263.

265. A method of producing a non-immunogenic CAR T cell comprising:
(a) modifying a genome of a cell to reduce or eliminate cell surface expression of active HLA-1 proteins in the cell and its progeny;
(b) introducing into the genome of the cell or one or more of its progeny a first polynucleotide coding for surface expression of a first CAR or portion thereof specific for a first antigen; and
(c) introducing into the genome of the cell or one or more of its progeny a second polynucleotide coding for surface expression of a second CAR or portion thereof specific for a second antigen.

266. The method of claim 265, wherein modifying genome of a cell to reduce or eliminate cell surface expression of active HLA-1 proteins comprises introducing a genomic modification into a B2M gene that partially or completely inactivates the B2M gene.

267. The method of claim 266, wherein modifying the genome comprises introducing a substitution, an insertion, a deletion, a nonsense mutation, or a truncation.

268. The method of claim 267, wherein the genomic modification comprises inserting a first transgene into a site within the B2M gene, wherein the first transgene codes for a B2M-HLA subunit fusion protein.

269. The method of claim 268, wherein the HLA subunit of the B2M-HLA subunit fusion protein comprises an HLA-C, -E, or -G subunit.

270. The method of claim 268, wherein the HLA subunit of the B2M-HLA subunit fusion protein comprises an HLA-E or -G subunit.

271. The method of claim 268, wherein the HLA subunit of the B2M-HLA subunit fusion protein comprises an HLA-E.

272. The method of claim 268, wherein the HLA subunit of the B2M-HLA subunit fusion protein comprises an HLA-G.

273. The method of any one of claims 265 through 272, wherein the first and/or second CAR or portion thereof comprises a CAR or portion thereof that binds B7H3, BCMA, GPRC5D, CD8, CD8a, CD19, CD20, CD22, CD28, 4-1BB, or CD3zeta.

274. The method of claim 273, wherein the CAR or portion thereof comprises a polypeptide at least 60, at least 70, at least 80, at least 90, at least 95, at least 99%, or 100% identical to any one of the amino acid sequences of SEQ ID NOs: 86-124.

275. The method of any one of claims 265 through 272, wherein the first and/or second CAR or portion thereof comprises a CAR or portion thereof that binds B7H3, BCMA, GPRC5D, CD8, CD8a, CD20, CD22, CD28, 4-1BB, or CD3zeta.

276. The method of claim 275, wherein the CAR or portion thereof comprises a polypeptide at least 60, at least 70, at least 80, at least 90, at least 95, at least 99%, or 100% identical to any one of the amino acid sequences of SEQ ID NOs: 86-104 or 116-124.

277. The method of any one of claims 265 through 276, wherein the polynucleotide coding for surface expression of a CAR is introduced at a site with a TCR subunit gene or a safe harbor site.

278. The method of any one of claims 265 through 277, further comprising:
(d) modifying the genome of the cell or one of its progeny to reduce or eliminate cell surface expression of one or more subunits of an HLA-2 protein.

279. The method of claim 278, wherein modifying a genome of the cell or one of its progeny to reduce or eliminate cell surface expression of one or more subunits of an HLA-2 protein comprises introducing a genomic modification into a gene coding for a transcription factor for one or more genes encoding the one or more subunits of an HLA-2 protein that partially or completely inactivates the gene for the transcription factor.

280. The method of claim 279, wherein the genomic modification comprises a substitution, an insertion, a deletion, a nonsense mutation, or a truncation.

281. The method of claim 279 or claim 280, wherein the transcription factor comprises CIITA.

282. The method of any one of claims 268 to 281, wherein introducing into the genome comprises delivering into the cell a nucleic acid-guided nuclease system, or one or more polynucleotides encoding for one or more parts of the system, comprising:
(i) a nucleic acid-guided nuclease; and
(ii) a guide nucleic acid compatible with and capable of binding to and activating the nucleic acid-guided nuclease, wherein the guide nucleic acid comprises:
(1) a targeter nucleic acid comprising a targeter stem sequence and a spacer sequence, wherein the spacer sequence is complementary to a target nucleotide sequence within a target polynucleotide of a genome of a human target cell; and
(2) a modulator nucleic acid comprising a modulator stem sequence complementary to the targeter stem sequence, and, optionally, a 5′ sequence;
wherein the nucleic acid-guided nuclease system target and cleave at least one strand in the target polynucleotide at or near the target nucleotide sequence.

283. The method of claim 282, wherein the nucleic acid-guided nuclease comprises a Class 1 or a Class 2 nuclease.

284. The method of claim 283, wherein the nucleic acid-guided nuclease comprises a Type II or a Type V nuclease.

285. The method of claim 284, wherein the nucleic acid-guided nuclease comprises a Type V-A, V-B, V-C, V-D, or V-E nuclease.

286. The method of claim 285, wherein the nucleic acid-guided nuclease comprises a Type V-A nuclease.

287. The method of claim 286, wherein the nucleic acid-guided nuclease comprises a MAD nuclease, an ART nuclease, or an ABW nuclease.

288. The method of claim 286, wherein the nucleic acid-guided nuclease comprises an amino acid sequence at least 80%, at least 85%, at least 90%, at least 95%, at least 99%, or 100% identical to the amino acid sequence of MAD, ART, or ABW nuclease.

289. The method of claim 286, wherein the nucleic acid-guided nuclease comprises a MAD1, MAD2, MAD3, MAD4, MADS, MAD6, MAD7, MAD8, MAD9, MAD10, MAD11, MAD12, MAD13, MAD14, MAD15, MAD16, MAD17, MAD18, MAD19, or MAD20 nuclease.

290. The method of claim 286, wherein the nucleic acid-guided nuclease comprises an ART1, ART2, ART3, ART4, ART5, ART6, ART7, ART8, ART9, ART10, ART11, ART11*, ART12, ART13, ART14, ART15, ART16, ART17, ART18, ART19, ART20, ART21, ART22, ART23, ART24, ART25, ART26, ART27, ART28, ART29, ART30, ART31, ART32, ART33, ART34, or ART35 nuclease.

291. The method of claim 286, wherein the nucleic acid-guided nuclease comprises an amino acid sequence at least 80%, at least 85%, at least 90%, at least 95%, at least 99%, or 100% identical to the amino acid sequence of MAD2, MAD7, ART2, ART11, or ART11*.

292. The method of claim 286, wherein the nucleic acid-guided nuclease comprises an amino acid sequence that is at least 80%, at least 85%, at least 90%, at least 95%, 99%, or 100% identical, to the amino acid sequence of SEQ ID NO: 37.

293. The method of any one of claims 282 through 292, wherein the nucleic acid-guided nuclease comprises at least one nuclear localization signal (NLS), at least one purification tag, or at least one cleavage site.

294. The method of claim 293, wherein the nucleic acid-guided nuclease comprises at least 4 NLS.

295. The method of claim 294, wherein the nucleic acid-guided nuclease comprises one N-terminal and three C-terminal nuclease localization signals (NLS).

296. The method of any one of claims 293 through 295, wherein the nuclear localization signals comprise any one of SEQ ID NOs: 40-56.

297. The method of claim 296, wherein the NLS comprises SEQ ID NOs: 40, 51, and 56.

298. The method of claim 282 through 297, wherein the guide nucleic acid comprises a single polynucleotide.

299. The method of claim 282 through 297, wherein the guide nucleic acid comprises a dual guide nucleic acid, wherein the targeter nucleic acid and the modulator nucleic acid are separate polynucleotides.

300. The method of claim 299, wherein the dual guide nucleic acid is capable of binding to and activating a nucleic acid-guided nuclease, that, in a naturally occurring system, is activated by a single crRNA in the absence of a tracrRNA.

301. The method of claim 282 through 300, wherein the target nucleotide sequence is within at least 10, at least 20, at least 30, at least 40, or at least 50 nucleotides of a protospacer adjacent motif (PAM) that is recognized by a nuclease with which the guide nucleic acid is compatible.

302. The method of claim 282 through 301, wherein the guide nucleic acid and the nuclease form a nucleic acid-guided nuclease complex.

303. The method of claim 302, wherein the guide nucleic acid further comprises a donor template recruiting sequence.

304. The method of claim 282 through 303, wherein the guide nucleic acid comprises a spacer sequence is at least 80%, at least 85%, at least 90%, at least 95%, at least 99.5%, or 100% identical to any one of any one of SEQ ID NOs: 125-2019.

305. The method of claim 282 through 304, wherein some or all of the guide nucleic acid is RNA.

306. The method of claim 305, wherein at least 50%, at least 70%, at least 90%, at least 95%, or 100% of the guide nucleic acid comprises RNA.

307. The method of claim 282 through 306, wherein the guide nucleic acid comprises one or more chemical modifications to one or more nucleotides and/or internucleotide linkages at or near the 5′ end, at or near the 3′ end, and/or both.

308. The method of claim 307, wherein the chemical modification comprises a 2′-O-alkyl, a 2′-O-methyl, a phosphorothioate, a phosphonoacetate, a thiophosphonoacetate, a 2′-O-methyl-3′-phosphorothioate, a 2′-O-methyl-3′-phosphonoacetate, a 2′-O-methyl-3′-thiophosphonoacetate, a 2′-deoxy-3′-phosphonoacetate, a 2′-deoxy-3′-thiophosphonoacetate, a suitable alternative, or a combination thereof.

309. The method of claim 282 through 308, wherein introducing into the genome further comprises delivering a donor template comprising the transgene.

310. The method of claim 309, wherein the donor template comprises two homology arms flanking the transgene.

311. The method of claim 310, wherein the homology arms comprise at most 1000, at most 900, at most 800, at most 700, at most 600, at most 500 nucleotides.

312. The method of any one of claims 309 through 311, wherein the donor template comprises single-stranded DNA, linear single-stranded RNA, linear double-stranded DNA, linear double-stranded RNA, circular single-stranded DNA, circular single-stranded RNA, circular double-stranded DNA, or circular double-stranded RNA.

313. The method of any one of claims 309 through 312, wherein the donor template comprises a mutation in a PAM sequence to partially or completely abolish binding of the RNP to the DNA.

314. The method of any one of claims 309 through 313, wherein the donor template comprises one or more promoters.

315. The method of claim 314, wherein the promoter shares at least 70%, at least 75%, at least 80%, at least 85%, at least 90%, at least 95%, at least 99.5%, or 100% sequence identity with any one of SEQ ID NOs: 78-85.

316. The method of any one of claims 309 through 315, wherein the donor template comprises one or more chemical modifications to one or more nucleotides and/or internucleotide linkages at or near the 5′ end, at or near the 3′ end, and/or both.

317. The method of claim 316, wherein the chemical modification comprises a 2′-O-alkyl, a 2′-O-methyl, a phosphorothioate, a phosphonoacetate, a thiophosphonoacetate, a 2′-O-methyl-3′-phosphorothioate, a 2′-O-methyl-3′-phosphonoacetate, a 2′-O-methyl-3′-thiophosphonoacetate, a 2′-deoxy-3′-phosphonoacetate, a 2′-deoxy-3′-thiophosphonoacetate, a suitable alternative, or a combination thereof.

318. The method of any one of claims 309 through 317, wherein at least portion of the donor template is inserted by an innate cell repair mechanism at or near the strand break.

319. The method of claim 318, wherein the innate cell repair mechanism comprises homology directed repair (HDR).

320. The method of any one of claims 265 to 319, wherein the cell comprises a human cell.

321. The method of claim 320, wherein the human cell comprises an immune cell or a stem cell.

322. The method of claim 321, wherein the human cell comprises an immune cell comprising a neutrophil, eosinophil, basophil, mast cell, monocyte, macrophage, dendritic cell, natural killer cell, or a lymphocyte.

323. The method of claim 321, wherein the human cell comprises an immune cell comprising a T cell.

324. The method of claim 321, wherein the human cell comprises a stem cell comprising a human pluripotent, multipotent stem cell, embryonic stem cell, induced pluripotent stem cell, hematopoietic stem cell, CD34+ cell.

325. The method of claim 321, wherein the human cell comprises a stem cell comprising an induced pluripotent stem cell.

326. The method of any one of claims 268 to 325, wherein delivering comprises electroporation.

327. A method for producing a population of non-immunogenic CAR T cells comprising:
(a) modifying a genome of a first cell to reduce or eliminate cell surface expression of HLA-1 proteins in the first cell and its progeny;
(b) introducing into the genome of the first cell a first polynucleotide coding for surface expression of a first CAR specific for a first antigen on the first cell;
(c) modifying a genome of a second cell to reduce or eliminate cell surface expression of HLA-1 proteins in the second cell and its progeny; and
(d) introducing into the genome of the second cell a second polynucleotide coding for surface expression of a second CAR specific for a second antigen on the second cell, wherein the first and second cells are the same cell, the first cell is a progeny of the second cell, or the second cell is a progeny of the first cell.

328. A method of producing a cell with an engineered genome comprising
(a) modifying a B2M gene in the genome of a first cell to reduce or eliminate expression of the B2M gene;
(b) modifying a T cell receptor (TCR) subunit gene in the genome of a second cell to reduce or eliminate expression of the subunit;
(c) modifying a CIITA gene in the genome of a third cell to reduce or eliminate expression of the CIITA gene; and
(d) introducing a first transgene into the genome of a fourth cell, wherein the first transgene codes for a B2M-HLA subunit fusion protein.

329. The method of claim 328, wherein (a) through (d) are performed simultaneously, wherein the first, second, third, and fourth cells are the same cell.

330. The method of claim 328, wherein one or more of (a) through (d) are performed sequentially.

331. The method of claim 330, wherein one or more cells resulting from claim 330 are propagated prior to performing the remainder of (a) through (d) not performed in claim 330.

332. The method of any one of claims 328 through 331, wherein the TCR subunit comprises an alpha subunit or a beta subunit or a TRAC, TRBC, CD3E, CD3D, CD3G, or CD3Z gene.

333. The method of claim 332, wherein the TCR subunit comprises an alpha subunit.

334. The method of any one of claims 328 to 333, wherein the HLA subunit of the B2M-HLA subunit fusion protein comprises an HLA-C, -E, or -G subunit.

335. The method of claim 334, wherein the HLA subunit of the B2M-HLA subunit fusion protein comprises an HLA-E or -G subunit.

336. The method of claim 334, wherein the HLA subunit of the B2M-HLA subunit fusion protein comprises an HLA-E.

337. The method of claim 334, wherein the HLA subunit of the B2M-HLA subunit fusion protein comprises an HLA-G.

338. The method of any one of claims 328 to 337, wherein the first transgene is introduced at a site within the B2M gene.

339. The method of any one of claims 328 to 338, wherein the cell comprises a human cell.

340. The method of claim 339, wherein the human cell comprises an immune cell or a stem cell.

341. The method of claim 340, wherein the human cell comprises an immune cell comprising a neutrophil, cosinophil, basophil, mast cell, monocyte, macrophage, dendritic cell, natural killer cell, or a lymphocyte.

342. The method of claim 340, wherein the human cell comprises an immune cell comprising a T cell.

343. The method of claim 340, wherein the human cell comprises a stem cell comprising a human pluripotent, multipotent stem cell, embryonic stem cell, induced pluripotent stem cell, hematopoietic stem cell, CD34+ cell.

344. The method of claim 340, wherein the human cell comprises a stem cell comprising an induced pluripotent stem cell.

345. The method of any one of claims 328 to 344, further comprising:
(c) introducing a second transgene into the genome, wherein the second transgene codes for a chimeric antigen receptor (CAR) or portion thereof.

346. The method of claim 345, wherein the second transgene is introduced at a site within the TCR subunit gene.

347. The method of any one of claims 345 to 346, wherein the CAR or portion thereof comprises polypeptide that binds to B7H3, BCMA, GPRC5D, CD8, CD8a, CD19, CD20, CD22, CD28, 4-1BB, or CD3zeta.

348. The method of claim 347, wherein the CAR or portion thereof comprises a polypeptide at least 60, at least 70, at least 80, at least 90, at least 95, at least 99%, or 100% identical to any one of the amino acid sequences of SEQ ID NOs: 86-124.

349. The method of any one of claims 345 to 346, wherein the CAR or portion thereof comprises a polypeptide that binds at least one of B7H3, BCMA, GPRC5D, CD8, CD8a, CD20, CD22, CD28, 4-1BB, or CD3zeta.

350. The method of claim 349, wherein the CAR or portion thereof comprises a polypeptide at least 60, at least 70, at least 80, at least 90, at least 95, at least 99%, or 100% identical to any one of the amino acid sequences of SEQ ID NOs: 86-104 or 116-124.

351. The method of any one of claims 328 to 350, wherein the modifying of step (a) comprises contacting DNA of the genome with a first nucleic acid-guided nuclease complexed with a first compatible guide nucleic acid (gNA) targeted to a first target nucleotide sequence within the B2M gene so that the DNA is cleaved at or near the first target nucleotide sequence.

352. The method of any one of claims 328 to 351, wherein the modifying of step (b) comprises contacting DNA of the genome with a second nucleic acid-guided nuclease complexed with a second compatible guide nucleic acid targeted to a second target nucleotide sequence within the ‘gene so that the DNA is cleaved at or near the second target nucleotide sequence.

353. The method of anyone of claims 328 to 352, wherein the modifying of step (c) comprises contacting DNA of the genome with a third nucleic acid-guided nuclease complexed with a third compatible guide nucleic acid targeted to a third target nucleotide sequence within the CIITA subunit gene so that the DNA is cleaved at or near the third target nucleotide sequence.

354. A method of modifying a genome of a human cell comprising:
(a) modifying a B2M gene in the genome to reduce or eliminate expression of the B2M gene;
(b) modifying a T cell receptor (TCR) subunit gene in the genome to reduce or eliminate expression of the subunit; and
(c) modifying a CIITA gene in the genome to reduce or eliminate expression of the CIITA gene;
wherein at least 2 of (a) to (c) are performed sequentially, not simultaneously, thereby producing a modified human cell.

355. A composition comprising a modified human cell comprising:
(a) a first genomic modification comprising a first portion of a first polynucleotide, wherein the first portion comprises a transgene, inserted into a site with a TRC subunit gene, whereby the TRC subunit gene is partially or completely inactivated and the transgene is expressed; and
(b) a second genomic modification comprising a second polynucleotide coding for a fusion protein of B2M and HLA-E or HLA-G inserted into a B2M gene, whereby endogenous B2M is partially or completely inactivated and the fusion protein is expressed.

356. The composition of claim 355, wherein the TRC subunit gene is completely inactivated.

357. The composition of claim 355 or claim 356, wherein the endogenous B2M gene is completely inactivated.

358. The composition of claim 355, further comprising:
(c) a third genomic modification in a CIITA gene, wherein the CIITA gene is partially or completely inactivated.

359. The composition of claim 358, wherein the CIITA gene is completely inactivated.

360. The composition of any one of claims 355-359, wherein the TRC subunit gene comprises a TRAC, TRBC, CD3E, CD3D, CD3G, or CD3Z gene.

361. The composition of claim 360, wherein the TRC subunit gene comprises a TRAC gene.

362. The composition of claim 360, wherein the TRC subunit gene comprises a TRBC gene.

363. The composition of claim 360, wherein the TRC subunit gene comprises a CD3E gene.

364. The composition of claim 360, wherein the TRC subunit gene comprises a CD3D gene.

365. The composition of claim 360, wherein the TRC subunit gene comprises a CD3G gene.

366. The composition of claim 360, wherein the TRC subunit gene comprises a CD3Z gene.

367. The composition of any one of claims 355-366, wherein the transgene comprises a CAR or portion thereof, a cytokine, and/or a reporter gene.

368. The composition of claim 367, wherein the transgene comprises a CAR or portion thereof.

369. A composition comprising a modified human cell comprising:
(a) a first genomic modification comprising a first portion of a polynucleotide, wherein the first portion comprises a transgene, inserted into a site with a TRC subunit gene, whereby the TRC subunit gene is partially or completely inactivated and the transgene is expressed; and
(b) a second genomic modification in a CIITA gene, wherein the CIITA gene is partially or completely inactivated.

370. The composition of claim 369, wherein the TRC subunit gene is completely inactivated.

371. The composition of claim 369 or claim 356, wherein the CIITA gene is completely inactivated.

372. The composition of any one of claims 369-371, further comprising:
(c) a third genomic modification comprising a polynucleotide coding for a fusion protein of B2M and HLA-E or HLA-G inserted into a B2M gene, whereby endogenous B2M is partially or completely inactivated and the fusion protein is expressed.

373. The composition of claim 372, wherein endogenous B2M is completely inactivated.

374. The composition of any one of claims 369-373, wherein the TRC subunit gene comprises a TRAC, TRBC, CD3E, CD3D, CD3G, or CD3Z gene.

375. The composition of claim 374, wherein the TRC subunit gene comprises a TRAC gene.

376. The composition of claim 374, wherein the TRC subunit gene comprises a TRBC gene.

377. The composition of claim 374, wherein the TRC subunit gene comprises a CD3E gene.

378. The composition of claim 374, wherein the TRC subunit gene comprises a CD3D gene.

379. The composition of claim 374, wherein the TRC subunit gene comprises a CD3G gene.

380. The composition of claim 374, wherein the TRC subunit gene comprises a CD3Z gene.

381. The composition of any one of claims 369-380, wherein the transgene comprises a CAR or portion thereof, a cytokine, and/or a reporter gene.

382. The composition of claim 381, wherein the transgene comprises a CAR or portion thereof.

383. A composition comprising a modified human cell comprising:
(a) a first genomic modification comprising a polynucleotide coding for a fusion protein of B2M and HLA-E or HLA-G inserted into a B2M gene, whereby endogenous B2M is partially or completely inactivated and the fusion protein is expressed;
(b) a second genomic modification in a CIITA gene, wherein the CIITA gene is partially or completely inactivated; and
(c) a third genomic modification comprising a first portion of a polynucleotide, wherein the first portion comprises a transgene, inserted into a site with a TRC subunit gene, whereby the TRC subunit gene is partially or completely inactivated and the transgene is expressed.

384. The composition of claim 383, wherein endogenous B2M is completely inactivated.

385. The composition of claim 383 or claim 384, wherein the CIITA gene is completely inactivated.

386. The composition of any one of claims 383-385, wherein the TRC subunit gene is completely inactivated.

387. The composition of any one of claims 383-386, wherein the TRC subunit gene comprises a TRAC, TRBC, CD3E, CD3D, CD3G, or CD3Z gene.

388. The composition of claim 387, wherein the TRC subunit gene comprises a TRAC gene.

389. The composition of claim 387, wherein the TRC subunit gene comprises a TRBC gene.

390. The composition of claim 387, wherein the TRC subunit gene comprises a CD3E gene.

391. The composition of claim 387, wherein the TRC subunit gene comprises a CD3D gene.

392. The composition of claim 387, wherein the TRC subunit gene comprises a CD3G gene.

393. The composition of claim 387, wherein the TRC subunit gene comprises a CD3Z gene.

394. The composition of any one of claims 383-393, wherein the transgene comprises a CAR or portion thereof, a cytokine, and/or a reporter gene.

395. The composition of claim 394, wherein the transgene comprises a CAR or portion thereof.
